(19) United States
(12) Patent Application Publication
(10) Pub. No.: US 2023/0203470 A1
(43) Pub. Date: Jun. 29, 2023

(54) COMPOSITIONS OF ADENOSINE DEAMINASE-2 (ADA2), VARIANTS THEREOF AND METHODS OF USING SAME

(71) Applicant: Halozyme, Inc., San Diego, CA (US)

(72) Inventors: Christopher D. THANOS, Tiburon, CA (US); Lin WANG, San Diego, CA (US); H. Michael SHEPARD, Eugene, OR (US)

(21) Appl. No.: 18/059,135

(22) Filed: Nov. 28, 2022

Related U.S. Application Data
(63) Continuation of application No. 15/940,803, filed on Mar. 29, 2018, now Pat. No. 11,584,923.
Application No. 15/940,803 is a continuation of application No. 15/094,908, filed on Apr. 8, 2016, now Pat. No. 9,969,998.
Application No. 15/094,908 is a continuation-in-part of application No. PCT/US15/55613, filed on Oct. 14, 2015.
(60) Provisional application No. 62/063,936, filed on Oct. 14, 2014.

(51) Int. Cl. C12N 9/78; A61K 38/48

(52) U.S. Cl. CPC C12N 9/78; C12Y 305/04004; A61K 38/48; A61K 38/00

(57) ABSTRACT

Provided are variant adenosine deaminase 2 (ADA2) proteins, conjugates thereof and compositions containing the proteins and/or conjugates. Also provided are methods and uses of the ADA2 proteins or conjugates for treating diseases and conditions, such as a tumor or cancer, and in particular any disease or condition associated with elevated adenosine or other associated marker.

### RELATED APPLICATIONS

[0001] This application is a continuation of allowed U.S. patent application Ser. No. 15/940,803, entitled “COMPOSITIONS OF ADENOSINE DEAMINASE-2 (ADA2), VARIANTS THEREOF AND METHODS OF USING SAME,” filed Mar. 29, 2018, which is a continuation of U.S. patent application Ser. No. 15/094,908, entitled “COMPOSITIONS OF ADENOSINE DEAMINASE-2 (ADA2), VARIANTS THEREOF AND METHODS OF USING SAME,” filed Apr. 8, 2016, which is a continuation-in-part of International PCT application No. PCT/US15/55613, filed Oct. 14, 2015, to Applicant Halozyme, Inc. and inventors Christopher D. Thanos, Lin Wang and H. Michael Shepard, entitled COMPOSITIONS OF ADENOSINE DEAMINASE-2 (ADA2), VARIANTS THEREOF AND METHODS OF USING SAME, which claims the benefit of priority to U.S. provisional application Ser. No. 62/063,936, filed Oct. 14, 2014, to inventors Christopher D. Thanos, Lin Wang and H. Michael Shepard, entitled COMPOSITIONS OF ADENOSINE DEAMINASE-2 (ADA2), VARIANTS THEREOF AND METHODS OF USING SAME. The subject matter of these applications is incorporated by reference in its entirety.

### INCORPORATION BY REFERENCE OF SEQUENCE LISTING PROVIDED ELECTRONICALLY

[0002] An electronic version of the Sequence Listing is filed herewith, the contents of which are incorporated by reference in their entirety. The electronic file was created on Nov. 28, 2022, is 1,520 kilobytes in size, and titled 3121CSEQ001.xml.

### FIELD OF THE INVENTION

[0003] Provided are variant adenosine deaminase 2 (ADA2) proteins. Also provided are ADA2 conjugates and compositions containing an ADA2 protein or ADA2 conjugate. Also provided are methods and uses of the ADA2 proteins or conjugates for treating diseases and conditions, such as a tumor or cancer, and in particular any disease or condition associated with elevated adenosine or other associated marker.

### BACKGROUND

[0004] Adenosine is a well-known effector of immune function. In T-cells, adenosine decreases T-cell receptor induced activation of NF-κB, and inhibits IL-2, IL-4, and IFN-γ.

[0005] Adenosine decreases T-cell cytotoxicity, increases T-cell anergy, and increases T-cell differentiation to Fop3+ or Lag-3+ regulatory (T-reg) T-cells. On NK cells, adenosine is known to decrease IFN-γ production, and suppress NK cell cytotoxicity. Adenosine is known to block neutrophil adhesion and extravasation, decrease phagocytosis, and attenuate levels of superoxide and nitric oxide. Adenosine also decreases the expression of TNF-α, IL-12, and MIP-1α on macrophages, attenuates MHC Class II expression, and increases levels of IL-10 and IL-6. In addition, adenosine decreases phagocytosis and superoxide and nitric oxide levels on macrophages. Through these immune-related activities, and others, aberrant or accumulated levels of adenosine is associated with a number of diseases and conditions, including those in which the adenosine-mediated immunosuppressive effects play a role.

[0006] Hence, there is a need for treatments of such diseases and conditions.

### SUMMARY

[0007] Provided herein are variant Adenosine Deaminase 2 (ADA2) proteins or catalytically active portions thereof that contain a modification(s) in the sequence of amino acids of an unmodified ADA2 protein or a catalytically active portion thereof. In some embodiments, the unmodified ADA2 protein can include the sequence of amino acids set forth in SEQ ID NO:5, or a sequence of amino acids that can exhibit at least 85% sequence identity to the sequence of amino acids set forth in SEQ ID NO:5, or is a catalytically active portion thereof; the amino acid modification(s) are selected from among amino acid replacement(s), deletion(s) and insertion(s); and the variant ADA2, when in dimer form, can exhibit one or more properties selected from among increased adenosine deaminase activity, reduced heparin binding, longer serum half-life, altered pH optimum, increased thermal stability, altered receptor binding and hyperglycosylation compared to the corresponding dimer form of the unmodified ADA2 protein. A variety of amino acid modifications, including replacements, deletions and insertions are provided. It is understood that the discreet modifications that confer a particular activity or property can be combined; as in proteins effects of mutation or modifications generally are additive. Any of the variant ADA2 or catalytically active portion thereof provided herein that contains modifications, including replacements, deletions and insertions, and nucleic acids encoding the variant ADA2 or catalytically active portion thereof, can be used in any of the methods, compositions, conjugates, modified forms, vectors, cells, combinations, uses and compositions for use, and combinations for use, provided herein.

[0008] In some embodiments, the variant ADA2 protein or catalytically active portion thereof, when in dimer form, exhibits increased adenosine deaminase activity or increased adenosine deaminase activity and reduced heparin binding.

[0009] In some embodiments, the unmodified ADA2 protein is a homodimer, and the monomer form comprises the sequence of amino acid residues set forth in SEQ ID NO:5. In some embodiments, the variant ADA2 is a catalytically active portion of the variant ADA2 protein as provided herein, wherein the unmodified ADA2 protein is a homodimer of corresponding catalytically active portions of the polypeptide whose sequence is set forth in of SEQ ID NO:5, wherein corresponding portions are determined by alignment. In some embodiment, the ADA2 protein or catalytically active portion thereof does not contain a modification selected from among an amino acid replacement corresponding to H7R, G18A, G18R, G18V, I64T, A80D, H83Q, V90A, C108G, A120V, H121R, W133G, R125C, R140Q, K141R, R142W, P164L, P222L, W235S, H306R, E330G, W333G, V365L, Y424C, F464S or a deletion corresponding to R8-K14del→--, with numbering with reference to amino acid residues set forth in SEQ ID NO:5.

[0010] In some embodiments, the unmodified ADA2 protein can include a sequence of amino acids that has at least 85%, 86%, 87%, 88%, 89%, 90%, 91%, 92%, 93%, 94%, 95%, 96%, 97%, 98%, 99% or more sequence identity to the sequence of amino acids set forth in SEQ ID NO:5 or is a catalytically active portion thereof. For example, the unmodified ADA2 protein has at least 95% sequence identity with the sequence of amino acids set forth in SEQ ID NO:5 or with the corresponding catalytically active portion thereof. For example, the unmodified ADA2 protein includes the sequence of amino acids set forth in any of SEQ ID NOS:5, 326-334, 340, 375 or 380-383 or is a catalytically active portion thereof, or the unmodified ADA2 protein has a sequence of amino acids set forth in any of SEQ ID NOS:5, 326-334, 340, 375 and 380-383 or is a catalytically active portion thereof. In particular embodiments, the unmodified ADA2 protein includes the sequence of amino acids set forth in SEQ ID NO:5 or is a catalytically active portion thereof.

[0011] In some embodiments, the catalytically active portion of the ADA2 protein can be an ADA2 protein that lacks all or a portion of the putative receptor binding (PRB) domain. For example, the catalytically active portion of the ADA2 protein can include the sequence of amino acids set forth in SEQ ID NOS:548-550. In some embodiments, the catalytically active portion of the unmodified ADA2 protein has the sequence set forth as residues 77-473 of the protein set forth in SEQ ID NO:5.

[0012] In some embodiments, the variant ADA2 protein can include up to 1, 2, 3, 4, 5, 6, 7, 8, 9, 10, 11, 12, 13, 14, 15, 16, 17, 18, 19, 20, 21, 22, 23, 24, 25, 26, 27, 28, 29, 30, 31, 32, 33, 34, 35, 36, 37, 38, 39, 40, 41, 42, 43, 44, 45, 46, 47, 48, 49, 50, 51, 52, 53, 54, 55, 56, 57, 58, 59, 60, 61, 62, 63, 64, 65, 66, 67, 68, 69, 70 or more amino acid modifications compared to the unmodified ADA2 protein. In some embodiments the variant ADA2 protein includes up to 2, 3, 4, 5, 6, 7, 8, 9 or 10 amino acid modifications. In some embodiments, the variant ADA2 protein does not contain the sequence of amino acids set forth in any of SEQ ID NOS:1, 5, 68, 286-302, 326-342 or 374-383 or catalytically active fragment thereof. In some embodiments, the primary amino acid sequence of the ADA2 protein variant is not the sequence of amino acids set forth in any of SEQ ID NOS: 1, 5, 68, 286-302, 326-342 or 374-383.

[0013] In some embodiments, the variant ADA2 protein, when in dimer form, exhibits adenosine deaminase activity to convert adenosine to inosine. In some embodiments herein, the variant ADA2 protein, when in dimer form, can exhibit a catalytic efficiency (k_{cat}/K_{M}) that is at least or at least about 5×10³ M⁻¹s⁻¹, 6×10³ M⁻¹s⁻¹, 7×10³ M⁻¹s⁻¹, 8×10³ M⁻¹s⁻¹, 9×10³ M⁻¹s⁻¹, 1×10⁴ M⁻¹s⁻¹, 2×10⁴ M⁻¹s⁻¹, 3×10⁴ M⁻¹s⁻¹, 4×10⁴ M⁻¹s⁻¹, 5×10⁴ M⁻¹s⁻¹, 6×10⁴ M⁻¹s⁻¹, 7×10⁴ M⁻¹s⁻¹, 8×10⁴ M⁻¹s⁻¹, 9×10⁴ M⁻¹s⁻¹, 1×10⁵ M⁻¹s⁻¹, 2×10⁵ M⁻¹s⁻¹, 3×10⁵ M⁻¹s⁻¹, 4×10⁵ M⁻¹s⁻¹, 5×10⁵ M⁻¹s⁻¹ or greater.

[0014] In some embodiments, the variant ADA2 protein, when in dimer form, can exhibit a thermal stability with a melting temperature (Tm) of at least 58° C. For example, the Tm of the ADA2 protein is at least 59° C., 60° C., 61° C., 62° C., 63° C., 64° C., 65° C., 66° C., 68° C., 69° C., 70° C., 71° C., 72° C. or greater.

[0015] In some embodiments, the variant ADA2 protein can contain a modification(s) that is an amino acid replacement(s); and the variant ADA2 protein includes one or more amino acid replacement(s) at an amino acid position corresponding to amino acid residue 11, 13, 20, 22, 26, 86, 179, 217, 219, 221, 258, 262, 264, 266, 267, 277, 283, 296, 309, 317, 321, 352, 366, 371, 372, 373, 374, 403, 404, 405, 406, 441, 444, 452, 461, 469 or 470, with reference to amino acid positions set forth in SEQ ID NO:5. For example, the amino acid replacement(s) are positions corresponding to amino acid residue 11, 20, 219, 221, 262, 264, 366, 371, 372 or 452, with reference to amino acid positions set forth in SEQ ID NO:5. In some embodiments, the variant ADA2 protein can include one or more amino acid replacement(s) selected from among K11A, K11D, K11E, K13A, K13D, K13E, R20A, R20D, R20E, R20N, V22S, K26A, K26D, K26E, D86A, D86C, D86E, D86F, D86G, D86H, D86I, D86K, D86L, D86M, D86N, D86P, D86Q, D86R, D86S, D86T, D86V, D86W, D86Y, E179A, E179C, E179D, E179F, E179G, E179H, E179I, E179K, E179L, E179M, E179N, E179P, E179Q, E179R, E179S, E179T, E179V, E179W, E179Y, R217A, R217D, R217E, R219A, R219C, R219D, R219E, R219F, R219G, R219H, R219I, R219K, R219L, R219M, R219N, R219P, R219Q, R219S, R219T, R219V, R219W, R219Y, L221A, L221C, L221D, L221E, L221F, L221G, L221H, L221I, L221K, L221M, L221N, L221P, L221Q, L221R, L221S, L221T, L221V, L221W, L221Y, K258A, K258D, K258E, S262A, S262C, S262D, S262E, S262F, S262G, S262H, S262I, S262K, S262L, S262M, S262N, S262P, S262Q, S262R, S262T, S262V, S262W, S262Y, H264A, H264C, H264D, H264E, H264F, H264G, H264I, H264K, H264L, H264M, H264N, H264P, H264Q, H264R, H264S, H264T, H264V, H264W, H264Y, S266A, S266C, S266D, S266E, S266F, S266G, S266H, S266I, S266K, S266L, S266M, S266N, S266P, S266Q, S266R, S266T, S266V, S266W, S266Y, K267A, K267C, K267D, K267E, K267F, K267G, K267H, K267I, K267L, K267M, K267N, K267P, K267Q, K267R, K267S, K267T, K267V, K267W, K267Y, R277A, R277D, R277E, R283A, R283D, R283E, V296A, V296C, V296D, V296E, V296F, V296G, V296H, V296I, V296K, V296L, V296M, V296N, V296P, V296Q, V296R, V296S, V296T, V296W, V296Y, K309A, K309D, K309E, K317A, K317D, K317E, K321A, K321D, K321E, R352A, R352D, R352E, R366A, R366D, R366E, K371A, K371D, K371E, K371N, K372A, K372D, K372E, K372N, D373S, I374S, T403N, G404N, H405S, P406S, R441A, R441D, R441E, K444A, K444D, K444E, K452A, K452D, K452E, K461A, K461D, K461E, K469A, K469D, K469E, K470A, K470D, and K470E, with reference to amino acid positions set forth in SEQ ID NO:5. For example, the variant ADA2 protein contains one or more amino acid replacement(s) selected from among replacements corresponding to H264A; H264Q; H264N; H264G; R219K; R219Q; R219N; R219A; L221A; L221V; L221G; E179D; E179A; E179S; E179T; E179V; E179G; S262A; S262V; S262M; S262N; D86A; D86C; D86E; D86F; D86G; D86H; D86I; D86K; D86L; D86M; D86N; D86P; D86Q; D86R; D86S; D86T; D86V; D86W; D86Y; E179C; E179F; E179H; E179I; E179K; E179L; E179M; E179N; E179P; E179Q; E179R; E179W; E179Y; R219C; R219D; R219E; R219F; R219G; R219H; R219I; R219L; R219M; R219P; R219S; R219T; R219V; R219W; R219Y; L221C; L221D; L221E; L221F; L221H; L221I; L221K; L221M; L221N; L221P; L221Q; L221R; L221S; L221T; L221W; L221Y; S262C; S262D; S262E; S262F; S262G; S262H; S262I; S262K; S262L; S262P; S262Q; S262R; S262T; S262W; S262Y; H264C; H264D; H264E; H264F; H264I; H264K; H264L; H264M; H264P; H264R; H264S; H264T; H264V; H264W; H264Y; S266A; S266C; S266D; S266E; S266F; S266G; S266H; S266I; S266K; S266L; S266M; S266N; S266P; S266Q; S266R; S266T; S266V; S266W; S266Y; K267A; K267C; K267D; K267E; K267F; K267G; K267H; K267I; K267L; K267M; K267N; K267P; K267Q; K267R; K267S; K267T; K267V; K267W; K267Y; V296A; V296C; V296D; V296E; V296F; V296G; V296H; V296I; V296K; V296L; V296M; V296N; V296P; V296Q; V296R; V296S; V296T; V296W; and V296Y.

[0016] In some embodiments, the variant ADA2 protein contains an amino acid replacement at one or both of positions corresponding to amino acid residue 219 and 262, with reference to amino acid positions set forth in SEQ ID NO:5. For Example, the variant ADA2 protein or catalytically active portion thereof contains the replacement corresponding to S262N or S262Q. In some embodiments, the variant ADA2 contains the replacement corresponding to S262N. In some embodiments, the variant ADA2 contains the replacement corresponding to R219K, R219Q, R219N or R219A. In other embodiments, the variant ADA2 contains the replacement corresponding to R219Q or the replacements R219Q/R20E. In other embodiments, the variant ADA2 contains the replacement corresponding to R219Q/S262N.

[0017] For example, the variant ADA2 protein or catalytically active portion thereof contains modification(s) selected from among any of R219Q/S262N/--→N1/--→A2/--→S3, R219Q/S262N/R20N/V22S, R219Q/S262N/K371N/D373S, R219Q/S262N/K372N/I374S, R219Q/S262N/T403N/H405S, R219Q/S262N/G404N/P406S, R219Q/S262N/C105-T147del→(Gly)₁₅, R219Q/S262N/C105-T147del→(Gly)₁₀, R219Q/S262N/C105-T147del→(Gly)₇, R219Q/S262N/C105-T147del→(Gly)₅, R219Q/S262N/C105-T147del→(Gly)₃, R219Q/S262N/R125N/P126A, R219Q/S262N/S127N/K129S, R219Q/S262N/P126N/E128T, R219Q/S262N/R112N/I114T, R219Q/S262N/I134N/L135C/L136T, R219Q/S262N/1134N/L135S/L136T, R219Q/S262N/R142N/Q144S, R219Q/S262N/E137N/Y139T, R219Q/S262N/P111N/G113S, R219Q/S262N/F119S, R219Q/S262N/F119K, R219Q/S262N/Y224R, R219Q/S262N/Y224N, R219Q/S262N/Y191S, R219Q/S262N/Y191D, R219Q/S262N/F183K, R219Q/S262N/Y191D/Y224R, R219Q/S262N/F109S, R219Q/S262N/F109A, R219Q/S262N/R118D, R219Q/S262N/R118A, R219Q/S262N/Y139T, R219Q/S262N/Y139A, R219Q/S262N/W133S, R219Q/S262N/W133T, R219Q/S262N/P124A, R219Q/S262N/P124S, R219Q/S262N/V99-Q144del→(GGGGS)₁, R219Q/S262N/V99-Q144del→(GGGGS)₂, R219Q/S262N/V99-Q144del→(GGGGS)₃, R219Q/S262N/C105-T147del→(GGGGS)₁, R219Q/S262N/C105-T147del→(GGGGS)₂, R219Q/S262N/C105-T147del→(GGGGS)₃, R219Q/S262N/K371D/V99-Q144del→(GGGGS)₁, R219Q/S262N/K371D/V99-Q144del→(GGGGS)₂, R219Q/S262N/K371D/V99-Q144del→(GGGGS)₃, R219Q/S262N/K371D/C105-T147del→(GGGGS)₁, R219Q/S262N/K371D/C105-T147del→(GGGGS)₂, R219Q/S262N/K371D/C105-T147del→(GGGGS)₃, R219Q/S262N/C105-T147del→(Gly)n, R219Q/S262N/K11A, R219Q/S262N/K11D, R219Q/S262N/K11E, R219Q/S262N/K13A, R219Q/S262N/K13D, R219Q/S262N/V99-Q144del→(GGGGS)n, R219Q/S262N/C105-T147del→(GGGGS)n, R219Q/S262N/N98-N156del, R219Q/S262N/C105-E148del, R219Q/S262N/C105-T147del, R219Q/S262N/V99-Q144del, R219Q/S262N/K371D/C105-T147del→(Gly)n, R219Q/S262N/K371D/C105-T147del→(Gly)₁₅, R219Q/S262N/K371D/C105-T147del→(Gly)₁₀, R219Q/S262N/K371D/C105-T147del→(Gly)₇, R219Q/S262N/K371D/C105-T147del→(Gly)₅, R219Q/S262N/K371D/C105-T147del→(Gly)₃, R219Q/S262N/K371D/V99-Q144del→(GGGGS)n, R219Q/S262N/K371D/C105-T147del→(GGGGS)n, R219Q/S262N/K371D/N98-N156del, R219Q/S262N/K371D/C105-E148del, R219Q/S262N/K371D/C105-T147del, R219Q/S262N/K371D/V99-Q144del, R219Q/S262N/K13E, R219Q/S262N/K371A, R219Q/S262N/K372A, R219Q/S262N/K372D, R219Q/S262N/K372E, R219Q/S262N/K452A, R219Q/S262N/K452D, R219Q/S262N/K452E, R219Q/S262N/R20A, R219Q/S262N/R20D, R219Q/S262N/R366A, R219Q/S262N/R366D, R219Q/S262N/R366E, R219Q/S262N/H264A, R219Q/S262N/H264Q, R219Q/S262N/H264N, R219Q/S262N/H264G, R219K/S262N, R219N/S262N, R219A/S262N, R219Q/S262N/L221A, R219Q/S262N/L221V, R219Q/S262N/L221G, R219Q/S262N/E179D, R219Q/S262N/E179A, R219Q/S262N/E179S, R219Q/S262N/E179T, R219Q/S262N/E179V, R219Q/S262N/E179G, R219Q/S262A, R219Q/S262V, R219Q/S262M, R219Q/S262N/K11A/R20A, R219Q/S262N/K11A/R20A/K371A, R219Q/S262N/R20A/K371A, R219Q/S262N/K11A/K371A, R219Q/S262N/K26A, R219Q/S262N/K26D, R219Q/S262N/K26E, R219Q/S262N/R217A, R219Q/S262N/R217D, R219Q/S262N/R217E, R219Q/S262N/K258A, R219Q/S262N/K258D, R219Q/S262N/K258E, R219Q/S262N/R277A, R219Q/S262N/R277D, R219Q/S262N/R277E, R219Q/S262N/R283A, R219Q/S262N/R283D, R219Q/S262N/R283E, R219Q/S262N/K309A, R219Q/S262N/K309D, R219Q/S262N/K309E, R219Q/S262N/K317A, R219Q/S262N/K317D, R219Q/S262N/K317E, R219Q/S262N/K321A, R219Q/S262N/K321D, R219Q/S262N/K321E, R219Q/S262N/R352A, R219Q/S262N/R352D, R219Q/S262N/R352E, R219Q/S262N/R441A, R219Q/S262N/R441D, R219Q/S262N/R441E, R219Q/S262N/K444A, R219Q/S262N/K444D, R219Q/S262N/K444E, R219Q/S262N/K461A, R219Q/S262N/K461D, R219Q/S262N/K461E, R219Q/S262N/K469A, R219Q/S262N/K469D, R219Q/S262N/K469E, R219Q/S262N/K470A, R219Q/S262N/K470D, R219Q/S262N/K470E, R219Q/S262N/D86A, R219Q/S262N/D86C, R219Q/S262N/D86E, R219Q/S262N/D86F, R219Q/S262N/D86G, R219Q/S262N/D86H, R219Q/S262N/D86I, R219Q/S262N/D86K, R219Q/S262N/D86L, R219Q/S262N/D86M, R219Q/S262N/D86N, R219Q/S262N/D86P, R219Q/S262N/D86Q, R219Q/S262N/D86R, R219Q/S262N/D86S, R219Q/S262N/D86T, R219Q/S262N/D86V, R219Q/S262N/D86W, R219Q/S262N/D86Y, R219Q/S262N/E179C, R219Q/S262N/E179F, R219Q/S262N/E179H, R219Q/S262N/E179I, R219Q/S262N/E179K, R219Q/S262N/E179L, R219Q/S262N/E179M, R219Q/S262N/E179N, R219Q/S262N/E179P, R219Q/S262N/E179Q, R219Q/S262N/E179R, R219Q/S262N/E179W, R219Q/S262N/E179Y, R219C/S262N, R219D/S262N, R219E/S262N, R219F/S262N, R219G/S262N, R219H/S262N, R219I/S262N, R219L/S262N, R219M/S262N, R219P/S262N, R219S/S262N, R219T/S262N, R219V/S262N, R219W/S262N, R219Y/S262N, R219Q/S262N/L221C, R219Q/S262N/L221D, R219Q/S262N/L221E, R219Q/S262N/L221F, R219Q/S262N/L221H, R219Q/S262N/L221I, R219Q/S262N/L221K, R219Q/S262N/L221M, R219Q/S262N/L221N, R219Q/S262N/L221P, R219Q/S262N/L221Q, R219Q/S262N/L221R, R219Q/S262N/L221S, R219Q/S262N/L221T, R219Q/S262N/L221W, R219Q/S262N/L221Y, R219Q/S262C, R219Q/S262D, R219Q/S262E, R219Q/S262F, R219Q/S262G, R219Q/S262H, R219Q/S262I, R219Q/S262K, R219Q/S262L, R219Q/S262P, R219Q/S262Q, R219Q/S262R, R219Q/S262T, R219Q/S262W, R219Q/S262Y, R219Q/S262N/H264C, R219Q/S262N/H264D, R219Q/S262N/H264E, R219Q/S262N/H264F, R219Q/S262N/H264I, R219Q/S262N/H264K, R219Q/S262N/H264L, R219Q/S262N/H264M, R219Q/S262N/H264P, R219Q/S262N/H264R, R219Q/S262N/H264S, R219Q/S262N/H264T, R219Q/S262N/H264V, R219Q/S262N/H264W, R219Q/S262N/H264Y, R219Q/S262N/S266A, R219Q/S262N/S266C, R219Q/S262N/S266D, R219Q/S262N/S266E, R219Q/S262N/S266F, R219Q/S262N/S266G, R219Q/S262N/S266H, R219Q/S262N/S266I, R219Q/S262N/S266K, R219Q/S262N/S266L, R219Q/S262N/S266M, R219Q/S262N/S266N, R219Q/S262N/S266P, R219Q/S262N/S266Q, R219Q/S262N/S266R, R219Q/S262N/S266T, R219Q/S262N/S266V, R219Q/S262N/S266W, R219Q/S262N/S266Y, R219Q/S262N/K267A, R219Q/S262N/K267C, R219Q/S262N/K267D, R219Q/S262N/K267E, R219Q/S262N/K267F, R219Q/S262N/K267G, R219Q/S262N/K267H, R219Q/S262N/K267I, R219Q/S262N/K267L, R219Q/S262N/K267M, R219Q/S262N/K267N, R219Q/S262N/K267P, R219Q/S262N/K267Q, R219Q/S262N/K267R, R219Q/S262N/K267S, R219Q/S262N/K267T, R219Q/S262N/K267V, R219Q/S262N/K267W, R219Q/S262N/K267Y, R219Q/S262N/V296A, R219Q/S262N/V296C, R219Q/S262N/V296D, R219Q/S262N/V296E, R219Q/S262N/V296F, R219Q/S262N/V296G, R219Q/S262N/V296H, R219Q/S262N/V296I, R219Q/S262N/V296K, R219Q/S262N/V296L, R219Q/S262N/V296M, R219Q/S262N/V296N, R219Q/S262N/V296P, R219Q/S262N/V296Q, R219Q/S262N/V296R, R219Q/S262N/V296S, R219Q/S262N/V296T, R219Q/S262N/V296W and R219Q/S262N/V296Y. In some embodiments, the variant ADA2 protein comprises the modifications selected from among R219Q/K11A/R20A, R219Q/K11A/R20A/K371A, R219Q/R20A/K371A, 219Q/K11A/K371A, S262N/K11A/R20A, S262N/K11A/R20A/K371A, S262N/R20A/K371A, S262N/K11A/K371A, R219Q/C105-T147del→(Gly)n, R219Q/V99-Q144del→(GGGGS)n, R219Q/C105-T147del→(GGGGS)n, R219Q/N98-N156del, R219Q/C105-E148del, R219Q/C105-T147del, R219Q/V99-Q144del, S262N/C105-T147del→(Gly)n, S262N/V99-Q144del→(GGGGS)n, S262N/C105-T147del→(GGGGS)n, S262N/N98-N156del, S262N/C105-E148del, S262N/C105-T147del and S262N/V99-Q144del.

[0018] In some embodiments, the variant ADA2 protein, when in dimer form, can exhibit increased adenosine deaminase activity. For example, the variant ADA2 protein, when in dimer form, can exhibit at least 110%, 120%, 130%, 140%, 150%, 160%, 170%, 180%, 190%, 200%, 225%, 250%, 300%, 350%, 400%, 450%, 500%, 600%, 700%, 800% or more activity of the corresponding dimer form of the unmodified ADA2 protein, wherein adenosine deaminase activity is assessed under the same conditions. In some embodiments, the variant ADA2 protein, when in dimer form, can exhibit a catalytic efficiency (k_{cat}/K_{M}) that is at least or at least about 1.2-fold, 1.3-fold, 1.4-fold, 1.5-fold, 1.6-fold, 1.7-fold, 1.8-fold, 1.9-fold, 2.0-fold, 2.2-fold, 2.5-fold, 3.0-fold, 3.5-fold, 4-fold, 4.5-fold, 5.0-fold, 6.0-fold, 7.0-fold, 8.0-fold, 9.0-fold, 10.0-fold or more compared to the catalytic efficiency (k_{cat}/K_{M}) of the corresponding dimer form of the unmodified ADA2 protein, wherein catalytic efficiency of adenosine deaminase activity is assessed under the same conditions. For example, the variant ADA2 protein, when in dimer form, can exhibit a catalytic efficiency (k_{cat}/K_{M}) that is at least or at least about 2×10⁴ M⁻¹ s⁻¹, 3×10⁴ M⁻¹ s⁻¹, 4×10⁴ M⁻¹ s⁻¹, 5×10⁴ M⁻¹ s⁻¹, 6×10⁴ M⁻¹ s⁻¹, 7×10⁴ M⁻¹ s⁻¹, 8×10⁴ M⁻¹ s⁻¹, 9×10⁴ M⁻¹ s⁻¹, 1×10⁵ M⁻¹ s⁻¹, 2×10⁵ M⁻¹ s⁻¹, 3×10⁵ M⁻¹ s⁻¹, 4×10⁵ M⁻¹ s⁻¹, 5×10⁵ M⁻¹ s⁻¹, or greater.

[0019] In some embodiments, the variant ADA2 protein or catalytically active portion thereof contains the modifications selected from among K371D/V99-Q144del→(GGGGS)₁, K371D/V99-Q144del→(GGGGS)₂, K371D/V99-Q144del→(GGGGS)₃, K371D/C105-T147del→(GGGGS)₁, K371D/C105-T147del→(GGGGS)₂, K371D/C105-T147del-(GGGGS)₃, R219Q/S262N/--→N1/--→A2/--→S3, K371D/C105-T147del→(Gly)n, K371D/C105-T147del→(Gly)₁₅, K371D/C105-T147del→(Gly)₁₀, K371D/C105-T147del→(Gly)₇, K371D/C105-T147del→(Gly)₅, K371D/C105-T147del→(Gly)₃, K371D/V99-Q144del→(GGGGS)n, K371D/C105-T147del→(GGGGS)n, K371D/N98-N156del, K371D/C105-E148del, K371D/C105-T147del and K371D/V99-Q144del. In some embodiments, the variant ADA2 protein or catalytically active portion thereof contains modifications selected from among R125N/P126A, S127N/K129S, P126N/E128T, R112N/I114T, 1134N/L135C/L136T, 1134N/L135S/L136T, R142N/Q144S, E137N/Y139T, P111N/G113S, F119S, F119K, Y224R, Y224N, Y191S, Y191D, F183K, Y191D/Y224R, F109S, F109A, R118D, R118A, Y139T, Y139A, W133S, W133T, P124A, P124S, V99-Q144del, V99-Q144del→(GGGGS)n, C105-T147del→(GGGGS)n, V99-Q144del→(GGGGS)₁, V99-Q144del→(GGGGS)₂, V99-Q144del→(GGGGS)₃, C105-T147del→(GGGGS)₁, C105-T147del→(GGGGS)₂, and C105-T147del→(GGGGS)₃.

[0020] In some embodiments, the variant ADA2 protein or catalytically active portion thereof contains modifications selected from among R125N/P126A, S127N/K129S, P126N/E128T, R112N/1114T, 1134N/L135C/L136T, 1134N/L135S/L136T, R142N/Q144S, E137N/Y139T, P111N/G113S, F119S, F119K, Y224R, Y224N, Y191S, Y191D, F183K, Y191D/Y224R, F109S, F109A, R118D, R118A, Y139T, Y139A, W133S, W133T, P124A, P124S, V99-Q144del, V99-Q144del→(GGGGS)n, C105-T147del→(GGGGS)n, V99-Q144del→(GGGGS)₁, V99-Q144del→(GGGGS)₂, V99-Q144del→(GGGGS)₃, C105-T147del→(GGGGS)₁, C105-T147del→(GGGGS)₂ and C105-T147del→(GGGGS)₃.

[0021] For example, among such variant ADA2 proteins are any that include one or more amino acid replacement(s) at an amino acid position corresponding to amino acid residue 11, 20, 219, 221, 262, 264, 366, 371, 372 or 452, with reference to amino acid positions set forth in SEQ ID NO:5. For example, the variant ADA2 protein can include one or more amino acid replacement(s) selected from among K11A, K11E, R20A, R20E, R219K, R219Q, L221A, L221V, L221G, S262N, H264Q, H264G, R366E, K371A, K371D, K371E, K372D, K372E, K452D and K452E, with reference to amino acid positions set forth in SEQ ID NO:5. In some embodiments, the variant ADA2 protein can include amino acid replacements selected from among K11A/R20A, K11A/R20A/K371A, R20A/K371A, K11A/K371A, S262N/K371D, S262N/K371E, S262N/R20E, S262N/R20E/K371D, S262N/R20E/K371E, R219Q/K371E, R219Q/K371D, R219Q/R20E, R219Q/K371E/R20E, R219Q/K371D/R20E, R219Q/S262N/K371E, R219Q/S262N/K371D, R219Q/S262N/R20E, R219Q/S262N/K371E/R20E, R219Q/S262N/K371D/R20E and R219Q/S262N, with reference to amino acid positions set forth in SEQ ID NO:5.

[0022] In some embodiments, the variant ADA2 protein, when in dimer form, can exhibit reduced heparin binding. For example, the variant ADA2 protein, when in dimer form, can exhibit no more than 1%, 2%, 3%, 4%, 5%, 6%, 7%, 8%, 9%, 10%, 15%, 20%, 25%, 30%, 35%, 40%, 45%, 50%, 55%, 60%, 65%, 70%, 75%, 80%, 85%, 90%, or 95% of the heparin binding of the corresponding dimer form of the unmodified ADA2 protein, wherein heparin binding is assessed under the same conditions.

[0023] For example, among such the variant ADA2 proteins are any that include one or more amino acid replacement(s) at an amino acid position corresponding to amino acid residue 20, 262, 366, 371, 372, or 452, with reference to amino acid positions set forth in SEQ ID NO:5. For example, the variant ADA2 protein can include one or more amino acid replacement(s) selected from among R20A, R20D, R20E, S262N, R366A, R366D, R366E, K371A, K371D, K371E, K372A, K372D, K372E and K452E, with reference to amino acid positions set forth in SEQ ID NO:5. In some embodiments, the variant ADA2 protein can include amino acid replacements selected from among K11A/R20A, K11A/R20A/K371A, R20A/K371A, K11A/K371A, S262N/K371D, S262N/K371E, S262N/R20E, S262N/R20E/K371D and S262N/R20E/K371E, with reference to amino acid positions set forth in SEQ ID NO:5.

[0024] In some embodiments, the variant ADA2 protein or catalytically active portion thereof contains one or more amino acid replacement(s) corresponding to K11A; K11D; K11E; K13A; K13D; K13E; K371A; K371D; K371E; K372A; K372D; K372E; K452A; K452D; K452E; R20A; R20D; R20E; R366A; R366D; R366E; K26A; K26D; K26E; R217A; R217D; R217E; K258A; K258D; K258E; R277A; R277D; R277E; R283A; R283D; R283E; K309A; K309D; K309E; K317A; K317D; K317E; K321A; K321D; K321E; R352A; R352D; R352E; R441A; R441D; R441E; K444A; K444D; K444E; K461A; K461D; K461E; K469A; K469D; K469E; K470A; K470D; and K470E.

[0025] In some embodiments, the variant ADA2 protein, when in dimer form, can exhibit a longer serum half-life (t_{1/2}). For example, the variant ADA2, when in dimer form, can exhibit a half-life that is at least or at least about 110%, 120%, 130%, 140%, 150%, 160%, 170%, 180%, 190%, 200%, 225%, 250%, 300%, 350%, 400%, 450%, 500%, 600%, 700%, 800% or more longer than the half-life of the corresponding dimer form of the unmodified ADA2 protein, wherein half-life is assessed under the same conditions.

[0026] In some embodiments, the variant ADA2 protein, when in dimer form, can exhibit increased thermal stability. For example, the variant ADA2 protein, when in dimer form, can exhibit thermal stability with a melting temperature (Tm) that is increased at least or at least about 0.5° C., 1.0° C., 2.0° C., 3.0° C., 4.0° C., 5.0° C., 6.0° C., 7.0° C., 8.0° C., 9.0° C., 10.0° C. or more compared to the Tm of the corresponding dimer form of the unmodified ADA2 protein, wherein Tm is assessed under the same conditions. For example, the variant ADA2 protein can have a melting temperature (Tm) of at least or at least about 67.6° C., 67.8° C., 68.0° C., 68.2° C., 68.4° C., 68.6° C., 68.8° C., 69.0° C., 69.2° C., 69.4° C., 69.6° C., 69.8° C., 70.0° C., 70.2° C., 70.4° C., 70.6° C., 70.8° C., 71.0° C., 71.2° C., 71.4° C., 71.6° C., 71.8° C. or higher.

[0027] In examples of any of the variant ADA2 proteins provided herein, the adenosine deaminase activity of the variant ADA2 protein can be assessed or exhibited at or about pH 6.5±0.2. In some examples, the variant ADA2 protein, when in dimer form, can exhibit an altered pH optimum for adenosine deaminase activity. For example, the variant ADA2 protein, when in dimer form, can exhibit a pH optimum for adenosine deaminase activity that is at a higher pH compared to the pH optimum of the corresponding dimer form of the unmodified ADA2 protein. For example, the variant ADA2 protein, when in dimer form, can have a pH optimum with a pH that is at least or at least about 6.6, 6.7, 6.8, 6.9, 7.0, 7.1, 7.2, 7.3, 7.4, 7.5 or higher. In other examples, the variant ADA2 protein, when in dimer form, can exhibit a pH optimum for adenosine deaminase activity that is at a lower pH compared to the pH optimum of the corresponding dimer form of the unmodified ADA2 protein. For example, the variant ADA2 protein, when in dimer form, can have a pH optimum with a pH that is less than or less than about 6.5, 6.4, 6.3, 6.2, 6.1, 6.0 or less.

[0028] In some embodiments, the variant ADA2 protein can include a modification of one or more amino acids in the putative receptor binding (PRB) domain, wherein the modification is an amino acid deletion, insertion or replacement. In any of such examples, the variant ADA2 protein does not contain a modification that is an amino acid replacement corresponding to amino acid replacement C108G, A120V, H121R, R125C, R140Q, K141R or R142W, with reference to amino acid positions set forth in SEQ ID NO:5.

[0029] In some embodiments, the variant ADA2 protein or catalytically active portion thereof lacks all or a portion of the putative receptor binding (PRB) domain or has a modification of the PRB, whereby any receptor binding or growth factor activity is reduced or eliminated or other activity of ADA2 other than deaminase activity is reduced or eliminated or interaction with the ADA domain is reduced or eliminated and the PRB domain corresponds to residues 98 to 156 set forth in SEQ ID NO:5. In some embodiments, the variant ADA2 lacks residues 105-148 or 105 to 147 or 99 to 144, with reference to amino acid positions set forth in SEQ ID NO:5. In some examples, the variant ADA2 protein or catalytically active portion thereof contains the sequence of amino acids set forth in any of SEQ ID NOS:548-550 and 579. In some embodiments, variant ADA2 protein or catalytically active portion thereof contains a deletion of all or a portion of the PRB domain and optionally an insertion of peptide linker.

[0030] In some examples, the variant ADA2 protein can have a deletion of one or more contiguous amino acid residues corresponding to any one or more contiguous amino acid residues between or between about amino acid residues 98 and 156 or amino acid residues 105 and 148, inclusive, with reference to amino acid positions set forth in SEQ ID NO:5. In any of such examples, the variant of the ADA2 polypeptide can further include substitution of the deleted region with a peptide linker. For example, the peptide linker can be selected from among (Gly)n (SEQ ID NO:368), where n is 2 to 20; (GGGGS)n (SEQ ID NO:343), where n is 1 to 6; (SSSSG)n (SEQ ID NO:344), where n is 1 to 6; (AlaAlaProAla)n (SEQ ID NO:350), where n is 1 to 6; GKSSGSGSESKS (SEQ ID NO:345); GGSTSGSGKSSEGKG (SEQ ID NO:346); GSTSGSGKSSSEGSGSTKG (SEQ ID NO:347); GSTSGSGKPGSGEGSTKG (SEQ ID NO:348); and EGKSSGSGSESKEF (SEQ ID NO:349). For example, the peptide linker can be selected from among GGG (SEQ ID NO:369); GGGGG (SEQ ID NO:360); GGGGGGG (SEQ ID NO:370); GGGGGGGGGG (SEQ ID NO:371); and GGGGGGGGGGGGGGG (SEQ ID NO:372).

[0031] In some embodiments, the variant ADA2 can contain the variant ADA2 polypeptide that can include a modification in the PRB domain that corresponds to C105-T147del→(Gly), where n is 2 to 20, such as C105-T147del→(Gly)₁₅, C105-T147del→(Gly)₁₀, C105-T147del→(Gly)₇, C105-T147del→(Gly)₅ or C105-T147del→(Gly)₃, with reference to amino acid positions set forth in SEQ ID NO:5. In some embodiments, the variant ADA2 can include modification in the PRB domain that corresponds to C105-T147del→(Gly)n, where n=2 to 20; C105-T147del→(Gly)₁₅; C105-T147del→(Gly)₁₀; C105-T147del→(Gly)₇; C105-T147del→(Gly)₅; C105-T147del→(Gly)₃; N98-N156del; C105-E148del; C105-T147del; V99-Q144del; V99-Q144del→(GGGGS)n, where n=1 to 5; C105-T147del→(GGGGS)n, where n=1 to 5; V99-Q144del→(GGGGS)₁; V99-Q144del→(GGGGS)₂; V99-Q144del→(GGGGS)₃; C105-T147del→(GGGGS)₁; C105-T147del→(GGGGS)₂; and C105-T147del→(GGGGS)₃, with reference to amino acid positions set forth in SEQ ID NO:5.

[0032] In some embodiments, the variant ADA2 protein or catalytically active portion thereof contains one or more amino acid replacement(s) selected from among replacements corresponding to F119S; F119K; Y224R; Y224N; Y191S; Y191D; F183K; Y191D/Y224R; F109S; F109A; R118D; R118A; Y139T; Y139A; W133S; W133T; P124A; and P124S, with reference to amino acid positions set forth in SEQ ID NO:5. In some embodiments, the variant ADA2 protein or catalytically active portion thereof contains amino acid replacements selected from among replacements corresponding to R219Q/S262N/F119S; R219Q/S262N/F119K; R219Q/S262N/Y224R; R219Q/S262N/Y224N; R219Q/S262N/Y191S; R219Q/S262N/Y191D; R219Q/S262N/F183K; R219Q/S262N/Y191D/Y224R; R219Q/S262N/F109S; R219Q/S262N/F109A; R219Q/S262N/R118D; R219Q/S262N/R118A; R219Q/S262N/Y139T; R219Q/S262N/Y139A; R219Q/S262N/W133S; R219Q/S262N/W133T; R219Q/S262N/P124A; and R219Q/S262N/P124S. In some embodiments, the variant ADA2 contains modifications selected from among K371D/V99-Q144del→(GGGGS)i; K371D/V99-Q144del→(GGGGS)₂; K371D/V99-Q144del→(GGGGS)₃; K371D/C105-T147del→(GGGGS)₁; K371D/C105-T147del→(GGGGS)₂; K371D/C105-T147del→(GGGGS)₃; R219Q/S262N/C105-T147del→(Gly)₁₅; R219Q/S262N/C105-T147del→(Gly)₁₀; R219Q/S262N/C105-T147del→(Gly)₇; R219Q/S262N/C105-T147del→(Gly)₅; R219Q/S262N/C105-T147del→(Gly)₃; R219Q/S262N/V99-Q144del→(GGGGS)₁; R219Q/S262N/V99-Q144del→(GGGGS)₂; R219Q/S262N/V99-Q144del→(GGGGS)₃; R219Q/S262N/C105-T147del→(GGGGS)₁; R219Q/S262N/C105-T147del→(GGGGS)₂; R219Q/S262N/C105-T147del→(GGGGS)₃; R219Q/S262N/K371D/V99-Q144del→(GGGGS)₁; R219Q/S262N/K371D/V99-Q144del→(GGGGS)₂; R219Q/S262N/K371D/V99-Q144del→(GGGGS)₃; R219Q/S262N/K371D/C105-T147del→(GGGGS)₁; R219Q/S262N/K371D/C105-T147del→(GGGGS)₂; R219Q/S262N/K371D/C105-T147del→(GGGGS)₃; K371D/C105-T147del→(Gly)n, where n=2 to 20; K371D/C105-T147del→(Gly)₁₅; K371D/C105-T147del→(Gly)₁₀; K371D/C105-T147del→(Gly)₇; K371D/C105-T147del→(Gly)₅; K371D/C105-T147del→(Gly)₃; K371D/V99-Q144del→(GGGGS)n, where n=1 to 5; K371D/C105-T147del→(GGGGS)n, where n=1 to 5; K371D/N98-N156del; K371D/C105-E148del; K371D/C105-T147del; K371D/V99-Q144del; R219Q/S262N/C105-T147del→(Gly)n, where n=2 to 20; R219Q/S262N/V99-Q144del→(GGGGS)n, where n=1 to 5; R219Q/S262N/C105-T147del→(GGGGS)n, where n=1 to 5; R219Q/S262N/N98-N156del; R219Q/S262N/C105-E148del; R219Q/S262N/C105-T147del; R219Q/S262N/V99-Q144del; R219Q/S262N/K371D/C105-T147del→(Gly)n, where n=2 to 20; R219Q/S262N/K371D/C105-T147del→(Gly)₁₅; R219Q/S262N/K371D/C105-T147del→(Gly)₁₀; R219Q/S262N/K371D/C105-T147del→(Gly)₇; R219Q/S262N/K371D/C105-T147del→(Gly)₅; R219Q/S262N/K371D/C105-T147del→(Gly)₃; R219Q/S262N/K371D/V99-Q144del→(GGGGS)n, where n=1 to 5; R219Q/S262N/K371D/C105-T147del→(GGGGS)n, where n=1 to 5; R219Q/S262N/K371D/N98-N156del; R219Q/S262N/K371D/C105-E148del; R219Q/S262N/K371D/C105-T147del; R219Q/S262N/K371D/V99-Q144del; R219Q/C105-T147del→(Gly)n, where n=2 to 20; R219Q/V99-Q144del→(GGGGS)n, where n=1 to 5; R219Q/C105-T147del→(GGGGS)n, where n=1 to 5; R219Q/N98-N156del; R219Q/C105-E148del; R219Q/C105-T147del; R219Q/V99-Q144del; S262N/C105-T147del→(Gly)n, where n=2 to 20; S262N/V99-Q144del→(GGGGS)n, where n=1 to 5; S262N/C105-T147del→(GGGGS)n, where n=1 to 5; S262N/N98-N156del; and S262N/C105-E148del; S262N/C105-T147del; and S262N/V99-Q144del.

[0033] In some embodiments of a variant ADA2 protein, including examples containing a modified PRB domain, the variant ADA2 protein, when in dimer form, can exhibit reduced binding to any one or more adenosine receptor (ADR) selected from among A₁, A_{2A}, A_{2B} and A₃ compared to binding of the unmodified ADA2 protein to the same receptor when assessed under the same conditions. For example, the variant ADA2 protein has a binding that is reduced at least or at least about 0.5-fold, 1-fold, 1.5-fold, 2-fold, 3-fold, 4-fold, 5-fold, 6-fold, 7-fold, 8-fold, 9-fold, 10-fold or more.

[0034] In some embodiments of the variant ADA2 provided herein, the variant ADA2 can be glycosylated, for example, at a native or a non-native glycosylation site. In some embodiments, the variant ADA2 protein can include a modification(s) that alters glycosylation by introduction of a non-native glycosylation site, whereby, when expressed in a cell capable of glycosylation, the variant ADA2 protein is hyperglycosylated compared to the unmodified ADA2 polypeptide. For example, the non-native glycosylation site is introduced by amino acid replacement(s) or insertion of one, two or three amino acids. For example, the modifications are selected from among modifications corresponding to--→N1/--→A2/--→S3, R20N/V22S, K371N/D373S, K372N/I374S, T403N/H405S and G404N/P406S, with reference to amino acid positions set forth in SEQ ID NO:5. In some embodiments, the variant ADA2 or catalytically active portion thereof contains modifications corresponding to R219Q/S262N/--→N1/--→A2/--→S3; R219Q/S262N/R20N/V22S; R219Q/S262N/K371N/D373S; R219Q/S262N/K372N/1374S; R219Q/S262N/T403N/H405S; or R219Q/S262N/G404N/P406S. In some embodiments, the variant ADA2 protein or catalytically active portion thereof contains a modification in the putative receptor binding domain (PRB) corresponding to one or more of the modifications selected from among: R125N/P126A; S127N/K129S; P126N/E128T; R112N/1114T; 1134N/L135C/L136T; I134N/L135S/L136T; R142N/Q144S; E137N/Y139T; and P111N/G113S. In some embodiments, the variant ADA2 protein or catalytically active portion thereof contains amino acid replacements corresponding to R219Q/S262N/R125N/P126A; R219Q/S262N/S127N/K129S; R219Q/S262N/P126N/E128T; R219Q/S262N/R112N/I114T; R219Q/S262N/I134N/L135C/L136T; R219Q/S262N/I134N/L135S/L136T; R219Q/S262N/R142N/Q144S; R219Q/S262N/E137N/Y139T; or R219Q/S262N/P111N/G113S.

[0035] In some embodiments, the variant ADA2 protein can be a human ADA2. In some embodiments, the variant ADA2 protein can be isolated or purified.

[0036] In some embodiments, the variant ADA2 protein can contain a polypeptide that exhibits at least 65% sequence identity to SEQ ID NO:5 or a catalytically active portion thereof. For example, the variant ADA2 protein can contain a polypeptide that exhibits at least 70%, 75%, 76%, 77%, 78%, 79%, 80%, 81%, 82%, 83%, 84%, 85%, 86%, 87%, 88%, 89%, 90%, 91%, 92%, 93%, 94%, 95%, 96%, 97%, 98%, 99% or more sequence identity to SEQ ID NO:5 or a catalytically active portion thereof. For example, the variant ADA2 protein contains a polypeptide that has the sequence of amino acids set forth in any of SEQ ID NOS:13-63 or 71-285 or a catalytically active portion thereof. In some embodiments, the variant ADA2 protein or catalytically active portion thereof contains the sequence of amino acids set forth in any of SEQ ID NOS: 551-579 or 581-993 or a catalytically active portion thereof.

[0037] In some embodiments, the variant ADA2 protein or a catalytically active portion thereof can contain amino acid replacements selected from among replacements corresponding to K11A/R20A; K11A/R20A/K371A; R20A/K371A; K11A/K371A; S262N/K371D; S262N/K371E; S262N/R20E; S262N/R20E/K371D; S262N/R20E/K371E; R219Q/K371E; R219Q/K371D; R219Q/R20E; R219Q/K371E/R20E; R219Q/K371D/R20E; R219Q/S262N/K371E; R219Q/S262N/K371D; R219Q/S262N/R20E; R219Q/S262N/K371E/R20E; R219Q/S262N/K371D/R20E; R219Q/S262N; R219Q/S262N/K11A; R219Q/S262N/K11D; R219Q/S262N/K11E; R219Q/S262N/K13A; R219Q/S262N/K13D; R219Q/S262N/K13E; R219Q/S262N/K371A; R219Q/S262N/K372A; R219Q/S262N/K372D; R219Q/S262N/K372E; R219Q/S262N/K452A; R219Q/S262N/K452D; R219Q/S262N/K452E; R219Q/S262N/R20A; R219Q/S262N/R20D; R219Q/S262N/R366A; R219Q/S262N/R366D; R219Q/S262N/R366E; R219Q/S262N/H264A; R219Q/S262N/H264Q; R219Q/S262N/H264N; R219Q/S262N/H264G; R219K/S262N; R219N/S262N; R219A/S262N; R219Q/S262N/L221A; R219Q/S262N/L221V; R219Q/S262N/L221G; R219Q/S262N/E179D; R219Q/S262N/E179A; R219Q/S262N/E179S; R219Q/S262N/E179T; R219Q/S262N/E179V; R219Q/S262N/E179G; R219Q/S262A; R219Q/S262V; R219Q/S262M; R219Q/S262N/K11A/R20A; R219Q/S262N/K11A/R20A/K371A; R219Q/S262N/R20A/K371A; R219Q/S262N/K11A/K371A; R219Q/S262N/K26A; R219Q/S262N/K26D; R219Q/S262N/K26E; R219Q/S262N/R217A; R219Q/S262N/R217D; R219Q/S262N/R217E; R219Q/S262N/K258A; R219Q/S262N/K258D; R219Q/S262N/K258E; R219Q/S262N/R277A; R219Q/S262N/R277D; R219Q/S262N/R277E; R219Q/S262N/R283A; R219Q/S262N/R283D; R219Q/S262N/R283E; R219Q/S262N/K309A; R219Q/S262N/K309D; R219Q/S262N/K309E; R219Q/S262N/K317A; R219Q/S262N/K317D; R219Q/S262N/K317E; R219Q/S262N/K321A; R219Q/S262N/K321D; R219Q/S262N/K321E; R219Q/S262N/R352A; R219Q/S262N/R352D; R219Q/S262N/R352E; R219Q/S262N/R441A; R219Q/S262N/R441D; R219Q/S262N/R441E; R219Q/S262N/K444A; R219Q/S262N/K444D; R219Q/S262N/K444E; R219Q/S262N/K461A; R219Q/S262N/K461D; R219Q/S262N/K461E; R219Q/S262N/K469A; R219Q/S262N/K469D; R219Q/S262N/K469E; R219Q/S262N/K470A; R219Q/S262N/K470D; R219Q/S262N/K470E; R219Q/S262N/D86A; R219Q/S262N/D86C; R219Q/S262N/D86E; R219Q/S262N/D86F; R219Q/S262N/D86G; R219Q/S262N/D86H; R219Q/S262N/D86I; R219Q/S262N/D86K; R219Q/S262N/D86L; R219Q/S262N/D86M; R219Q/S262N/D86N; R219Q/S262N/D86P; R219Q/S262N/D86Q; R219Q/S262N/D86R; R219Q/S262N/D86S; R219Q/S262N/D86T; R219Q/S262N/D86V; R219Q/S262N/D86W; R219Q/S262N/D86Y; R219Q/S262N/E179C; R219Q/S262N/E179F; R219Q/S262N/E179H; R219Q/S262N/E179I; R219Q/S262N/E179K; R219Q/S262N/E179L; R219Q/S262N/E179M; R219Q/S262N/E179N; R219Q/S262N/E179P; R219Q/S262N/E179Q; R219Q/S262N/E179R; R219Q/S262N/E179W; R219Q/S262N/E179Y; R219C/S262N; R219D/S262N; R219E/S262N; R219F/S262N; R219G/S262N; R219H/S262N; R219I/S262N; R219L/S262N; R219M/S262N; R219P/S262N; R219S/S262N; R219T/S262N; R219V/S262N; R219W/S262N; R219Y/S262N; R219Q/S262N/L221C; R219Q/S262N/L221D; R219Q/S262N/L221E; R219Q/S262N/L221F; R219Q/S262N/L221H; R219Q/S262N/L221I; R219Q/S262N/L221K; R219Q/S262N/L221M; R219Q/S262N/L221N; R219Q/S262N/L221P; R219Q/S262N/L221Q; R219Q/S262N/L221R; R219Q/S262N/L221S; R219Q/S262N/L221T; R219Q/S262N/L221W; R219Q/S262N/L221Y; R219Q/S262C; R219Q/S262D; R219Q/S262E; R219Q/S262F; R219Q/S262G; R219Q/S262H; R219Q/S262I; R219Q/S262K; R219Q/S262L; R219Q/S262P; R219Q/S262Q; R219Q/S262R; R219Q/S262T; R219Q/S262W; R219Q/S262Y; R219Q/S262N/H264C; R219Q/S262N/H264D; R219Q/S262N/H264E; R219Q/S262N/H264F; R219Q/S262N/H264I; R219Q/S262N/H264K; R219Q/S262N/H264L; R219Q/S262N/H264M; R219Q/S262N/H264P; R219Q/S262N/H264R; R219Q/S262N/H264S; R219Q/S262N/H264T; R219Q/S262N/H264V; R219Q/S262N/H264W; R219Q/S262N/H264Y; R219Q/S262N/S266A; R219Q/S262N/S266C; R219Q/S262N/S266D; R219Q/S262N/S266E; R219Q/S262N/S266F; R219Q/S262N/S266G; R219Q/S262N/S266H; R219Q/S262N/S266I; R219Q/S262N/S266K; R219Q/S262N/S266L; R219Q/S262N/S266M; R219Q/S262N/S266N; R219Q/S262N/S266P; R219Q/S262N/S266Q; R219Q/S262N/S266R; R219Q/S262N/S266T; R219Q/S262N/S266V; R219Q/S262N/S266W; R219Q/S262N/S266Y; R219Q/S262N/K267A; R219Q/S262N/K267C; R219Q/S262N/K267D; R219Q/S262N/K267E; R219Q/S262N/K267F; R219Q/S262N/K267G; R219Q/S262N/K267H; R219Q/S262N/K267I; R219Q/S262N/K267L; R219Q/S262N/K267M; R219Q/S262N/K267N; R219Q/S262N/K267P; R219Q/S262N/K267Q; R219Q/S262N/K267R; R219Q/S262N/K267S; R219Q/S262N/K267T; R219Q/S262N/K267V; R219Q/S262N/K267W; R219Q/S262N/K267Y; R219Q/S262N/V296A; R219Q/S262N/V296C; R219Q/S262N/V296D; R219Q/S262N/V296E; R219Q/S262N/V296F; R219Q/S262N/V296G; R219Q/S262N/V296H; R219Q/S262N/V296I; R219Q/S262N/V296K; R219Q/S262N/V296L; R219Q/S262N/V296M; R219Q/S262N/V296N; R219Q/S262N/V296P; R219Q/S262N/V296Q; R219Q/S262N/V296R; R219Q/S262N/V296S; R219Q/S262N/V296T; R219Q/S262N/V296W; R219Q/S262N/V296Y; R219Q/K11A/R20A; R219Q/K11A/R20A/K371A; R219Q/R20A/K371A; R219Q/K11A/K371A; S262N/K11A/R20A; S262N/K11A/R20A/K371A; S262N/R20A/K371A; and S262N/K11A/K371A, with reference to SEQ ID NO:5.

[0038] The variant ADA2 protein can be a monomer or a dimer. In particular, among variant ADA2 proteins provided herein are dimers of a variant ADA2 protein, that can include any of the variant ADA2 proteins provided. In some examples, the dimer can be a homodimer. In other examples, the dimer can be a heterodimer.

[0039] Provided are nucleic acid molecules encoding the variant ADA2 proteins provided herein. Also provided herein is a vector that includes the nucleic acid encoding any of the variant ADA2 proteins provided herein. The vector can be a eukaryotic or a prokaryotic vector, such as a mammalian vector or a viral vector. For example, the vector is an adenovirus vector, an adeno-associated-virus vector, a retrovirus vector, a herpes virus vector, a lentivirus vector, a poxvirus vector, or a cytomegalovirus vector. In some embodiments, the vector is an oncolytic vector. In some embodiments, the vector can also encode a soluble hyaluronidase. Also provided herein are cells containing any of the vectors provided herein. The cell can be a eukaryotic cell, such as a mammalian cell. If human, the cells are isolated or are provided as a cell culture. For example, the cell is a mammalian cell, such as a Chinese Hamster Ovary (CHO) cell. In some embodiments, the cell can expresses the variant ADA2 protein, such as a dimer. Also provided herein are variant ADA2 proteins, such as variant ADA2 dimers, that are produced by the cell provided herein. In some embodiments, the cell is an isolated cell or a cell culture, such as a eukaryotic cell, a non-human cell, a mammalian cell, or a cell that is not a human stem cell. In some embodiments, the cell is an immune cell, such as a T cell, a tumor-infiltrating lymphocyte (TIL), a cytotoxic T lymphocyte (CTL), a natural killer (NK) cell or a lymphokine-activated killer (LAK) cell. In some embodiments, the cell is a T cell that encodes and expresses chimeric antigen receptor (CAR) and the variant ADA2 protein or dimer. In some examples, the CAR is specific for a tumor cell antigen, and the tumor antigen is selected from among HER2, CD19, HERV-K, CD20, CD22, ROR1, mesothelin, CD33/IL3Ra, c-Met, PSMA, Glycolipid F77, EGFRvIII, GD-2, NY-ESO-1 TCR, MAGE A3 TCR and GD2 and combinations thereof.

[0040] Provided herein are conjugates include a variant ADA2 protein or a catalytically active portion of any ADA2 protein provided herein, such as a variant ADA2 dimer provided in any examples herein, linked directly or indirectly via a linker to a heterologous moiety, such as a toxin or therapeutic drug.

[0041] Also provided herein are conjugates that include an ADA2 protein linked directly or indirectly via a linker to a heterologous moiety. In any of the conjugates, the ADA2 protein can be a monomer or a dimer. In some examples, the dimer is a homodimer; in other it is a heterodimer. In any of the conjugates in the examples herein, the heterologous moiety is conjugated to one or both subunits in the dimer.

The heterologous moiety, for example, can be selected from among a peptide, small molecule, nucleic acid, carbohydrate and polymer.

[0042] In some embodiments of the conjugates provided herein, the heterologous moiety is a half-life extending moiety. For example, the half-life extending moiety is selected from among biocompatible fatty acids and derivatives thereof, hydroxy alkyl starch (HAS), polyethylene glycol (PEG), Poly (Glyₓ-Ser_{y})ₙ, homo-amino-acid polymers (HAP), hyaluronic acid (HA), heparosan polymers (HEP), phosphorylcholine-based polymers (PC polymer), Fleximers, dextran, polysialic acids (PSA), Fe domain, Transferrin, Albumin, elastin-like peptides, XTEN sequences, albumin binding peptides, a CTP peptide, and any combination thereof.

[0043] In some examples, the half-life extending moiety is a PEG and the ADA2 protein is PEGylated. For example, the PEG can be selected from among methoxy-polyethylene glycols (mPEG), PEG-glycidyl ethers (Epox-PEG), PEG-oxycarbonylimidazole (CDI-PEG), branched PEGs and polyethylene oxide (PEO). In some examples, the PEG has a molecular weight of from or from about 1 kDa to about 100 kDa. The PEG can be linear or branched. In some embodiments of conjugates provided herein, the PEG moieties result from reaction with a PEG reagent selected from among mPEG-Succinimidyl Propionates (mPEG-SPA), mPEG Succinimidyl Carboxymethyl Ester (mPEG-SCM), mPEG-Succinimidyl Butanoates (mPEG-SBA), mPEG2-N-Hydroxylsuccinimide, mPEG-succinimidyl butanoate (mPEG-SBA), mPEG-succinimidyl α-methylbutanoate (mPEG-SMB), mPEG-butyraldehyde, PEG-p-nitrophenyl-carbonate and PEG-propionaldehyde. For example, the PEG moeities result from reaction with a PEG reagent selected from among mPEG-SCM (20 kDa), mPEG-SCM (30 kDa), mPEG-SBA (5 kDa), mPEG-SBA (20 kDa), mPEG-SBA (30 kDa), mPEG-SMB (20 kDa), mPEG-SMB (30 kDa), mPEG-butyraldehyde (30 kDa), mPEG-SPA (20 kDa), mPEG-SPA (30 kDa), mPEG2-NHS (10 kDa branched), mPEG2-NHS (20 kDa branched), mPEG2-NHS (40 kDa branched), mPEG2-NHS (60 kDa branched), PEG-NHS-biotin (5 kDa biotinylated), PEG-p-nitrophenyl-carbonate (30 kDa) and PEG-propionaldehyde (30 kDa).

[0044] In embodiments of the conjugates provided herein, the ADA2 protein can contain the sequence of amino acids set forth in any of SEQ ID NOS:5, 326-334, 340, 375 or 380-383, a sequence that exhibits at least 85% sequence identity to the sequence of amino acids set forth in any of SEQ ID NOS:5, 326-334, 340, 375 or 380-383 or a catalytically active form thereof. For example, the ADA2 protein can contain a sequence of amino acids that exhibits at least 85%, 86%, 87%, 88%, 89%, 90%, 91%, 92%, 93%, 94%, 95%, 96%, 97%, 98%, 99% or more sequence identity to the sequence of amino acids set forth in any of SEQ ID NOS:5, 326-334, 340, 375 or 380-383 or a catalytically active portion thereof. For example, the ADA2 protein can contain a sequence of amino acids that exhibits at least 85%, 86%, 87%, 88%, 89%, 90%, 91%, 92%, 93%, 94%, 95%, 96%, 97%, 98%, 99% or more sequence identity to the sequence of amino acids set forth in SEQ ID NOS:5 or a catalytically active portion thereof. In another example, the ADA2 protein can include a polypeptide having the sequence of amino acids set forth in SEQ ID NO:5 or a catalytically active portion thereof.

[0045] In embodiments of conjugates provided herein, the ADA2 protein is a variant ADA2 protein that contains a sequence of amino acids that includes a modification(s) in the sequence of amino acids of an unmodified ADA2 protein or a catalytically active portion thereof, where the unmodified ADA2 protein contains the sequence of amino acids set forth in SEQ ID NO:5, or a sequence of amino acids that exhibits at least 85% sequence identity to the sequence of amino acids set forth in SEQ ID NO:5, or is a catalytically active portion thereof. In any of such examples, the amino acid modification(s) are selected from among amino acid replacement(s), deletion(s) and insertion(s); and the variant ADA2 protein, when in dimer form, can exhibit adenosine deaminase activity to convert adenosine to inosine. In any of the conjugates provided herein, the ADA2 protein, when in dimer form, can exhibit a catalytic efficiency (k_{cat}/K_{M}) that is at least or at least about 5×10³ M⁻¹ s⁻¹, 6×10³ M⁻¹ s⁻¹, 7×10³ M⁻¹ s⁻¹, 8×10³ M⁻¹ s⁻¹, 9×10³ M⁻¹ s⁻¹, 1×10⁴ M⁻¹ s⁻¹, 2×10⁴ M⁻¹ s⁻¹, 3×10⁴ M⁻¹ s⁻¹, 4×10⁴ M⁻¹ s⁻¹, 5×10⁴ M⁻¹ s⁻¹, 6×10⁴ M⁻¹ s⁻¹, 7×10⁴ M⁻¹ s⁻¹, 8×10⁴ M⁻¹ s⁻¹, 9×10⁴ M⁻¹ s⁻¹, 1×10⁵ M⁻¹ s⁻¹, 2×10⁵ M⁻¹ s⁻¹, 3×10⁵ M⁻¹ s⁻¹, 4×10⁵ M⁻¹ s⁻¹, 5×10⁵ M⁻¹ s⁻¹, or greater.

[0046] In any of the embodiments of conjugates provided herein, the modification(s) of the ADA2 protein can be an amino acid replacement(s); and the variant ADA2 protein can include one or more amino acid replacement(s) at an amino acid position corresponding to amino acid residue 11, 13, 20, 22, 26, 86, 179, 217, 219, 221, 258, 262, 264, 266, 267, 277, 283, 296, 309, 317, 321, 352, 366, 371, 372, 373, 374, 403, 404, 405, 406, 441, 444, 452, 461, 469 or 470, with reference to amino acid positions set forth in SEQ ID NO:5. For example, in some embodiments of conjugates provided herein, the variant ADA2 protein can include one or more amino acid replacement(s) selected from among K11A, K11D, K11E, K13A, K13D, K13E, R20A, R20D, R20E, R20N, V22S, K26A, K26D, K26E, D86A, D86C, D86E, D86F, D86G, D86H, D86I, D86K, D86L, D86M, D86N, D86P, D86Q, D86R, D86S, D86T, D86V, D86W, D86Y, E179A, E179C, E179D, E179F, E179G, E179H, E179I, E179K, E179L, E179M, E179N, E179P, E179Q, E179R, E179S, E179T, E179V, E179W, E179Y, R217A, R217D, R217E, R219A, R219C, R219D, R219E, R219F, R219G, R219H, R219I, R219K, R219L, R219M, R219N, R219P, R219Q, R219S, R219T, R219V, R219W, R219Y, L221A, L221C, L221D, L221E, L221F, L221G, L221H, L221I, L221K, L221M, L221N, L221P, L221Q, L221R, L221S, L221T, L221V, L221W, L221Y, K258A, K258D, K258E, S262A, S262C, S262D, S262E, S262F, S262G, S262H, S262I, S262K, S262L, S262M, S262N, S262P, S262Q, S262R, S262T, S262V, S262W, S262Y, H264A, H264C, H264D, H264E, H264F, H264G, H264I, H264K, H264L, H264M, H264N, H264P, H264Q, H264R, H264S, H264T, H264V, H264W, H264Y, S266A, S266C, S266D, S266E, S266F, S266G, S266H, S266I, S266K, S266L, S266M, S266N, S266P, S266Q, S266R, S266T, S266V, S266W, S266Y, K267A, K267C, K267D, K267E, K267F, K267G, K267H, K267I, K267L, K267M, K267N, K267P, K267Q, K267R, K267S, K267T, K267V, K267W, K267Y, R277A, R277D, R277E, R283A, R283D, R283E, V296A, V296C, V296D, V296E, V296F, V296G, V296H, V296I, V296K, V296L, V296M, V296N, V296P, V296Q, V296R, V296S, V296T, V296W, V296Y, K309A, K309D, K309E, K317A, K317D, K317E, K321A, K321D, K321E, R352A, R352D, R352E, R366A, R366D, R366E, K371A, K371D, K371E, K371N, K372A, K372D, K372E, K372N, D373S, I374S, T403N, G404N, H405S, P406S, R441A, R441D, R441E, K444A, K444D, K444E, K452A, K452D, K452E, K461A, K461D, K461E, K469A, K469D, K469E, K470A, K470D, and K470E, with reference to amino acid positions set forth in SEQ ID NO:5. For example, the variant ADA2 protein can include one or more amino acid replacement(s) selected from among K11A, K11E, R20A, R20D, R20E, R219K, R219Q, L221A, L221V, L221G, S262N, H264Q, H264G, R366A, R366D, R366E, K371A, K371D, K371E, K372A, K372D, K372E, K452D and K452E, with reference to amino acid positions set forth in SEQ ID NO:5. In some examples, the variant ADA2 protein can include amino acid replacements selected from among K11A/R20A, K11A/R20A/K371A, R20A/K371A, K11A/K371A, S262N/K371D, S262N/K371E, S262N/R20E, S262N/R20E/K371D, S262N/R20E/K371E, R219Q/K371E, R219Q/K371D, R219Q/R20E, R219Q/K371E/R20E, R219Q/K371D/R20E, R219Q/S262N/K371E, R219Q/S262N/K371D, R219Q/S262N/R20E, R219Q/S262N/K371E/R20E, R219Q/S262N/K371D/R20E and R219Q/S262N, with reference to amino acid positions set forth in SEQ ID NO:5.

[0047] In some embodiments of conjugates provided herein, the variant ADA2 protein can include a modification of one or more amino acids in the putative receptor binding (PRB) domain that is an amino acid deletion, insertion or replacement. For example, in some embodiments of conjugates provided herein, the variant ADA2 protein can include deletion of one or more contiguous amino acid residues corresponding to any one or more contiguous amino acid residues between or between about amino acid residues 98 and 156 or amino acid residues 105 and 148, inclusive, with reference to amino acid positions set forth in SEQ ID NO:5. In some examples, the variant ADA2 protein in the conjugate can further include substitution of the deleted region with a peptide linker. For example, the peptide linker can be selected from among (Gly)n (SEQ ID NO:368), where n is 2 to 20; (GGGGS)n (SEQ ID NO:343), where n is 1 to 6; (SSSSG)n (SEQ ID NO:344), where n is 1 to 6; (AlaAlaProAla)n (SEQ ID NO:350), where n is 1 to 6; GKSSGSGSESKS (SEQ ID NO:345); GGSTSGSGKSSEGKG (SEQ ID NO:346); GSTSGSGKSSSEGSGSTKG (SEQ ID NO:347); GSTSGSGKPGSGEGSTKG (SEQ ID NO:348); and EGKSSGSGSESKEF (SEQ ID NO:349). In some examples, the peptide linker is selected from among GGG (SEQ ID NO:369); GGGGG (SEQ ID NO:360); GGGGGGG (SEQ ID NO:370); GGGGGGGGGG (SEQ ID NO:371); and GGGGGGGGGGGGGGG (SEQ ID NO:372). For example, the modification in the PRB domain can correspond to C105-T147del→(Gly), where n is 2 to 20, such as, C105-T147del→(Gly)₅, C105-T148del→(Gly)₁₀, C105-T147del→(Gly)₇, C105-T147del→(Gly)₅ or C105-T147del→(Gly)₃, with reference to amino acid positions set forth in SEQ ID NO:5.

[0048] In some embodiments of conjugates provided herein, the ADA2 protein in the conjugate can be glycosylated at one or more native or non-native glycosylation sites. For example, in some embodiments of conjugates provided herein containing a variant ADA2 protein, the variant ADA2 protein in the conjugate can include a modification(s) that alters glycosylation by introduction of a non-native glycosylation site. The non-native glycosylation site can be introduced by creating the canonical glycosylation sequence (NXT/S, where X is not Pro for N-linked carbohydrates, S/T for O-linked) by introducing amino acid replacement(s), insertions or deletions of one, two or three amino acids. For example, the modifications that alter glycosylation are selected from among modifications corresponding to--→N1/--→A2/--→S3, R20N/V22S, K371N/D373S, K372N/I374S, T403N/H405S and G404N/P406S, with reference to amino acid positions set forth in SEQ ID NO:5.

[0049] In some embodiments of conjugates provided herein, the variant ADA2 protein in the conjugate can have the sequence of amino acids set forth in any of SEQ ID NOS:13-63 or 71-285 or a catalytically active portion thereof.

[0050] In some embodiments of conjugates containing an ADA2 or variant ADA2 protein provided herein, the conjugate retains the adenosine deaminase activity compared to the ADA2 protein that is not conjugated. For example, the conjugate can exhibit from or from about 50% to 500%, 50% to 200%, 50% to 100%, 50% to 80%, 80% to 500%, 80% to 200%, 80% to 100%, 100% to 500% or 100% to 200%, each inclusive, of the adenosine deaminase activity of the ADA2 protein that is not conjugated, such as at least 50%, 60%, 70%, 80%, 90%, 100%, 110%, 120%, 130%, 140%, 150%, 160%, 170%, 180%, 190%, 200%, 300%, 400%, 500% or more the adenosine deaminase activity of the ADA2 protein that is not conjugated. In some embodiments of conjugates provided herein, the ADA2 in the conjugate can exhibit a catalytic efficiency (k_{cat}/K_{M}) that is at least or at least about 5×10³ M⁻¹ s⁻¹, 6×10³ M⁻¹ s⁻¹, 7×10³ M⁻¹ s⁻¹, 8×10³ M⁻¹ s⁻¹, 9×10³ M⁻¹ s⁻¹, 1×10⁴ M⁻¹ s⁻¹, 2×10⁴ M⁻¹ s⁻¹, 3×10⁴ M⁻¹ s⁻¹, 4×10⁴ M⁻¹ s⁻¹, 5×10⁴ M⁻¹ s⁻¹, 6×10⁴ M⁻¹ s⁻¹, 7×10⁴ M⁻¹ s⁻¹, 8×10⁴ M⁻¹ s⁻¹, 9×10⁴ M⁻¹ s⁻¹, 1×10⁵ M⁻¹ s⁻¹, 2×10⁵ M⁻¹ s⁻¹, 3×10⁵ M⁻¹ s⁻¹, 4×10⁵ M⁻¹ s⁻¹, 5×10⁵ M⁻¹ s⁻¹, or greater.

[0051] Provided herein are combinations containing any of the variant ADA2 proteins or a catalytically active portion thereof provided herein, any variant ADA2 dimer provided herein or any conjugate of any of the examples provided herein, and a therapeutic agent. Also provided herein are combinations containing any ADA2 protein; and a therapeutic agent. In any examples of the combination provided herein, the ADA2 protein can be a monomer or a dimer. For example, the ADA2 protein can be a dimer, such as a homodimer.

[0052] In some embodiments of combinations provided herein, the therapeutic agent can be selected from among an antibody, cytotoxic agent, chemotherapeutic agents, cytokine, growth inhibitory agent, anti-hormonal agent, kinase inhibitor, anti-angiogenic agent, cardioprotectant, immunostimulatory agent, immunosuppressive agent, immune checkpoint inhibitor, antibiotic and angiogenesis inhibitor. For example, the therapeutic agent can be an anti-cancer agent. In some embodiments of combinations provided herein, the anti-cancer agent can be an anti-cancer antibody, a chemotherapeutic agent, a radioimmunotherapeutic, an anti-angiogenic agent or an immune checkpoint inhibitor.

[0053] For example, the anti-cancer agent can be an immune checkpoint inhibitor; and the target of the immune checkpoint inhibitor can be selected from among CTLA4, PD-1, and PD-L1. In some embodiments of combinations provided herein, the immune checkpoint inhibitor can be an antibody, a fusion protein, an aptamer, or an immune checkpoint protein-binding fragment thereof. For example, the immune checkpoint inhibitor is an anti-immune checkpoint protein antibody or antigen-binding fragment thereof. In particular examples, the immune checkpoint inhibitor is selected from among: an anti-CTLA4 antibody, derivative thereof, or antigen-binding fragment thereof; an anti-PD-L1 antibody, derivative thereof, or antigen-binding fragment thereof; and an anti-PD-1 antibody, derivative thereof, or antigen-binding fragment thereof. For example, the immune checkpoint inhibitor can be selected from among: Ipilimumab, a derivative thereof, or an antigen-binding fragment thereof; Tremelimumab, a derivative thereof, or an antigen-binding fragment thereof; Nivolumab, a derivative thereof, or an antigen-binding fragment thereof; and Pidilizumab, a derivative thereof, or an antigen-binding fragment thereof.

[0054] In some embodiments of combinations provided herein, the therapeutic agent can be an anti-hyaluronan agent. For example, the anti-hyaluronan agent can be a soluble hyaluronidase. In some embodiments of combinations provided herein, the soluble hyaluronidase can exhibit hyaluronidase activity at neutral pH. In particular, the soluble hyaluronidase can be selected from among bovine, ovine or a C-terminal truncated human PH20 that lacks all or a portion of the glycosylphosphatidylinositol (GPI) anchor attachment sequence. For example, the soluble hyaluronidase is a C-terminally truncated human PH20 that lacks all or a portion of the GPI anchor attachment sequence, such as those set forth in any of SEQ ID NOS:481-488, 493-514, or 526-532, or that has a sequence of amino acids that has at least 85%, 86%, 87%, 88%, 89%, 90%, 91%, 92%, 93%, 94%, 95%, 96%, 97%, 98% or 99% sequence identity to a sequence of amino acids set forth in any of SEQ ID NOS:481-488, 493-514, or 526-532 and is soluble and retains hyaluronidase activity. In some embodiments of combinations provided herein, the anti-hyaluronan agent or soluble hyaluronidase can be conjugated to a polymer, such as a PEG moiety.

[0055] In some embodiments of combinations provided herein, the ADA2 protein can include a polypeptide having the sequence of amino acids set forth in any of SEQ ID NOS:5, 326-334, 340, 375 or 380-383, a sequence that can exhibit at least 85% sequence identity to the sequence of amino acids set forth in SEQ ID NOS:5, 326-334, 340, 375 or 380-383 or a catalytically active form thereof. For example, the ADA2 protein can include a protein having a sequence of amino acids that can exhibit at least 86%, 87%, 88%, 89%, 90%, 91%, 92%, 93%, 94%, 95%, 96%, 97%, 98%, 99% or more sequence identity to the sequence of amino acids set forth in SEQ ID NOS:5, 326-334, 340, 375 or 380-383 or a catalytically active portion thereof. In particular examples, the ADA2 protein can contain a sequence of amino acids that can exhibit at least 86%, 87%, 88%, 89%, 90%, 91%, 92%, 93%, 94%, 95%, 96%, 97%, 98%, 99% or more sequence identity to the sequence of amino acids set forth in SEQ ID NO:5. For example, the ADA2 protein can contain the sequence of amino acids set forth in SEQ ID NO:5.

[0056] In some embodiments of combinations provided herein, the ADA2 protein is a variant ADA2 protein having a sequence of amino acids that includes a modification(s) in the sequence of amino acids of an unmodified ADA2 polypeptide or a catalytically active portion thereof. In any of such examples, the unmodified ADA2 protein can include the sequence of amino acids set forth in SEQ ID NO:5, or a sequence of amino acids that can exhibit at least 85% sequence identity to the sequence of amino acids set forth in SEQ ID NO:5, or is a catalytically active portion thereof, the amino acid modification(s) are selected from among amino acid replacement(s), deletion(s) and insertion(s); and the variant ADA2 protein, when in dimer form, can exhibit adenosine deaminase activity to convert adenosine to inosine.

[0057] In some embodiments of combinations provided herein, the ADA2 protein, when in dimer form, can exhibit a catalytic efficiency (k_{cat}/K_{M}) that is at least or at least about 5×10³ M¹ s⁻¹, 6×10³ M⁻¹ s⁻¹, 7×10³ M⁻¹ s⁻¹, 8×10³ M⁻¹ s⁻¹, 9×10³ M⁻¹ s⁻¹, 1×10⁴ M⁻¹ s⁻¹, 2×10⁴ M¹ s⁻¹, 3×10⁴ M⁻¹ s⁻¹, 4×10⁴ M⁻¹ s⁻¹, 5×10⁴ M⁻¹ s⁻¹, 6×10⁴ M⁻¹ s⁻¹, 7×10⁴ M⁻¹ s⁻¹, 8×10⁴ M¹ s⁻¹, 9×10⁴ M⁻¹ s⁻¹, 1×10⁵ M⁻¹ s⁻¹, 2×10⁵ M⁻¹ s⁻¹, 3×10⁵ M⁻¹ s⁻¹, 4×10⁵ M⁻¹ s⁻¹, 5×10⁵ M¹ s⁻¹, or greater.

[0058] In some embodiments of combinations provided herein, the modification(s) in the sequence of amino acids of an unmodified ADA2 protein can include an amino acid replacement(s); and the variant ADA2 protein can include one or more amino acid replacement(s) at an amino acid position corresponding to amino acid residue 11, 13, 20, 22, 26, 86, 179, 217, 219, 221, 258, 262, 264, 266, 267, 277, 283, 296, 309, 317, 321, 352, 366, 371, 372, 373, 374, 403, 404, 405, 406, 441, 444, 452, 461, 469 or 470, with reference to amino acid positions set forth in SEQ ID NO:5. For example, the variant ADA2 protein can include one or more amino acid replacement(s) selected from among K11A, K11D, K11E, K13A, K13D, K13E, R20A, R20D, R20E, R20N, V22S, K26A, K26D, K26E, D86A, D86C, D86E, D86F, D86G, D86H, D86I, D86K, D86L, D86M, D86N, D86P, D86Q, D86R, D86S, D86T, D86V, D86W, D86Y, E179A, E179C, E179D, E179F, E179G, E179H, E179I, E179K, E179L, E179M, E179N, E179P, E179Q, E179R, E179S, E179T, E179V, E179W, E179Y, R217A, R217D, R217E, R219A, R219C, R219D, R219E, R219F, R219G, R219H, R219I, R219K, R219L, R219M, R219N, R219P, R219Q, R219S, R219T, R219V, R219W, R219Y, L221A, L221C, L221D, L221E, L221F, L221G, L221H, L221I, L221K, L221M, L221N, L221P, L221Q, L221R, L221S, L221T, L221V, L221W, L221Y, K258A, K258D, K258E, S262A, S262C, S262D, S262E, S262F, S262G, S262H, S262I, S262K, S262L, S262M, S262N, S262P, S262Q, S262R, S262T, S262V, S262W, S262Y, H264A, H264C, H264D, H264E, H264F, H264G, H264I, H264K, H264L, H264M, H264N, H264P, H264Q, H264R, H264S, H264T, H264V, H264W, H264Y, S266A, S266C, S266D, S266E, S266F, S266G, S266H, S266I, S266K, S266L, S266M, S266N, S266P, S266Q, S266R, S266T, S266V, S266W, S266Y, K267A, K267C, K267D, K267E, K267F, K267G, K267H, K267I, K267L, K267M, K267N, K267P, K267Q, K267R, K267S, K267T, K267V, K267W, K267Y, R277A, R277D, R277E, R283A, R283D, R283E, V296A, V296C, V296D, V296E, V296F, V296G, V296H, V296I, V296K, V296L, V296M, V296N, V296P, V296Q, V296R, V296S, V296T, V296W, V296Y, K309A, K309D, K309E, K317A, K317D, K317E, K321A, K321D, K321E, R352A, R352D, R352E, R366A, R366D, R366E, K371A, K371D, K371E, K371N, K372A, K372D, K372E, K372N, D373S, I374S, T403N, G404N, H405S, P406S, R441A, R441D, R441E, K444A, K444D, K444E, K452A, K452D, K452E, K461A, K461D, K461E, K469A, K469D, K469E, K470A, K470D, and K470E, with reference to amino acid positions set forth in SEQ ID NO:5. In particular examples, the variant ADA2 protein can include one or more amino acid replacement(s) selected from among K11A, K11E, R20A, R20D, R20E, R219K, R219Q, L221A, L221V, L221G, S262N, H264Q, H264G, R366A, R366D, R366E, K371A, K371D, K371E, K372A, K372D, K372E, K452D and K452E, with reference to amino acid positions set forth in SEQ ID NO:5. In some examples of the combinations provided herein, the variant ADA2 protein can include amino acid replacements selected from among K11A/R20A, K11A/R20A/K371A, R20A/K371A, K11A/K371A, S262N/K371D, S262N/K371E, S262N/R20E, S262N/R20E/K371D, S262N/R20E/K371E, R219Q/K371E, R219Q/K371D, R219Q/R20E, R219Q/K371E/R20E, R219Q/K371D/R20E, R219Q/S262N/K371E, R219Q/S262N/K371D, R219Q/S262N/R20E, R219Q/S262N/K371E/R20E, R219Q/S262N/K371D/R20E and R219Q/S262N, with reference to amino acid positions set forth in SEQ ID NO:5.

[0059] In some embodiments of combinations provided herein, the variant ADA2 protein can include a modification of one or more amino acids in the putative receptor binding (PRB) domain, wherein the modification is an amino acid deletion, insertion or replacement. For example, the variant ADA2 can include deletion of one or more contiguous amino acid residues corresponding to any one or more contiguous amino acid residues between or between about amino acid residues 98 and 156 or amino acid residues 105 and 148, inclusive, with reference to amino acid positions set forth in SEQ ID NO:5. In some embodiments, the variant of ADA2 polypeptide can further include substitution of the deleted region with a peptide linker. For example, the peptide linker can be selected from among (Gly)n (SEQ ID NO:368), where n is 2 to 20; (GGGGS)n (SEQ ID NO:343), where n is 1 to 6; (SSSSG)n (SEQ ID NO:344), where n is 1 to 6; (AlaAlaProAla)n (SEQ ID NO:350), where n is 1 to 6; GKSSGSGSESKS (SEQ ID NO:345); GGSTSGSGKSSEGKG (SEQ ID NO:346); GSTSGSGKSSSEGSGSTKG (SEQ ID NO:347); GSTSGSGKPGSGEGSTKG (SEQ ID NO:348); and EGKSSGSGSESKEF (SEQ ID NO:349). In particular examples, the peptide linker is selected from among GGG (SEQ ID NO:369); GGGGG (SEQ ID NO:360); GGGGGGG (SEQ ID NO:370); GGGGGGGGGG (SEQ ID NO:371); and GGGGGGGGGGGGGGG (SEQ ID NO:372). In some embodiments of combinations provided herein, the modification in the PRB domain of the variant ADA2 polypeptide corresponds to C105-T147del→(Gly)ₙ, where n is 2 to 20, such as C105-T147del→(Gly)₁₅, C105-T147del→(Gly)₁₀, C105-T147del→(Gly)₇, C105-T147del→(Gly)₅ or C105-T147del→(Gly)₃, with reference to amino acid positions set forth in SEQ ID NO:5.

[0060] In some embodiments of combinations provided herein, the ADA2 protein in the combination can be glycosylated at one or more native or non-native glycosylation sites. For example, in some embodiments of combinations provided herein containing a variant ADA2 protein, the variant ADA2 protein in the combination include a modification(s) that alters glycosylation by introduction of a non-native glycosylation site. The non-native glycosylation site is introduced by amino acid replacement(s) or insertion of one, two or three amino acids. For example, the modifications that alter hyperglycosylation can be selected from among modifications corresponding to--→N1/--→A2/--→S3, R20N/V22S, K371N/D373S, K372N/I374S, T403N/H405S and G404N/P406S, with reference to amino acid positions set forth in SEQ ID NO:5.

[0061] In some embodiments of combinations provided herein, the variant ADA2 polypeptide has the sequence of amino acids set forth in any of SEQ ID NOS: 13-63 or 71-285 or a catalytically active portion thereof.

[0062] Provided herein are pharmaceutical compositions that can include any of the variant ADA2 proteins or a catalytically active portion thereof provided herein, any variant ADA2 dimer provided herein or any conjugate provided herein, in a pharmaceutically acceptable vehicle. In some embodiments, the pharmaceutical composition can be formulated for local or systemic administration. For example, the pharmaceutical composition is formulated for intravenous administration.

[0063] Provided herein are methods of treating a tumor or cancer in a subject, that can include administering to the subject any of the variant ADA2 proteins or a catalytically active portion thereof provided herein, any variant ADA2 dimer provided herein, any conjugate provided herein, or any combination provided herein. Also provided are medical uses or pharmaceutical compositions for use of any of the variant ADA2 proteins or a catalytically active portion thereof provided herein, any variant ADA2 dimer provided herein or any conjugate provided herein for treating a tumor or a cancer in a subject. Also provided are combinations for use of any of the combinations provided herein for use in treating a tumor or cancer.

[0064] Also provided herein are methods of treating a tumor or cancer in a subject that can include administering to the subject any ADA2 protein. Also provided are medical uses of an ADA2 protein or pharmaceutical composition for use containing an ADA2 protein for treating a tumor or a cancer. Also provided are combinations for use containing an ADA2 protein and a therapeutic agent for treating a tumor or cancer.

[0065] In some embodiments of methods, uses, pharmaceutical compositions for use or uses provided herein, the tumor can be a solid tumor or a metastatic tumor. In particular examples, the tumor can be a carcinoma, gliomas, sarcoma, adenocarcinoma, adenosarcoma, or adenoma. In some embodiments, the tumor can be a tumor of the breast, heart, lung, small intestine, colon, spleen, kidney, bladder, head and neck, ovary, prostate, brain, pancreas, skin, bone, bone marrow, blood, thymus, uterus, testicles, cervix or liver.

[0066] In some embodiments of methods provided herein, the subject can be selected for treatment based on elevated levels of plasma adenosine, tumor-associated expression of adenosine receptor (ADR) or tumor-associated expression of a nucleotidase. In particular examples, the ADR is A2A or A2B. In particular examples, the nucleotidase is CD39 or CD73. In some embodiments of methods provided herein, the elevated level is at least 0.5-fold, 1-fold, 2-fold, 3-fold, 4-fold, 5-fold, 6-fold, 7-fold, 8-fold, 9-fold, 10-fold, 15-fold, 20-fold, 30-fold, 40-fold, 50-fold, 60-fold, 70-fold, 80-fold, 90-fold, 100-fold, 150-fold, 200-fold, 500-fold, 1000-fold or more, compared to the predetermined level or predetermined amount or control sample.

[0067] In some embodiments of methods provided herein, the method of treating a tumor or cancer in a subject can further include administration of one or more anticancer agents or treatments. For example, the anti-cancer agent can be selected from among an anti-cancer antibody, a chemotherapeutic agent, a radioimmunotherapeutic, an anti-angiogenic agent and an immune checkpoint inhibitor.

[0068] Provided herein are methods of treating a disease or condition in a subject, that can include administering to the subject any of the variant ADA2 proteins or a catalytically active portion thereof provided herein, any variant ADA2 dimer provided herein, any conjugate provided herein, or any combination provided herein for treating a disease or condition that is a non-cancer hyperproliferative disease, a fibrotic disease, an infectious disease, a vasculopathy or Severe Combined Immunodeficiency (SCID). Also provided are medical uses or pharmaceutical compositions for use of any of the variant ADA2 proteins or a catalytically active portion thereof provided herein, any variant ADA2 dimer provided herein or any conjugate provided herein for treating a non-cancer hyperproliferative disease, a fibrotic disease, an infectious disease, a vasculopathy or Severe Combined Immunodeficiency (SCID) in a subject. Also provided are combinations for use of any of the combinations provided herein for use in treating a non-cancer hyperproliferative disease, a fibrotic disease, an infectious disease, a vasculopathy or Severe Combined Immunodeficiency (SCID). Also provided herein are methods of treating a disease or condition in a subject, that can include administering to the subject any ADA2 protein, for treating a disease or condition that is a non-cancer hyperproliferative disease, a fibrotic disease, an infectious disease, a vasculopathy or Severe Combined Immunodeficiency (SCID). Also provided are medical uses of an ADA2 protein or pharmaceutical compositions for use containing an ADA2 protein for treating a disease or condition that is a non-cancer hyperproliferative disease, a fibrotic disease, an infectious disease, a vasculopathy or Severe Combined Immunodeficiency (SCID). Also provided are combinations for use containing an ADA2 protein and a therapeutic agent for treating a disease or condition that is a non-cancer hyperproliferative disease, a fibrotic disease, an infectious disease, a vasculopathy or Severe Combined Immunodeficiency (SCID).

[0069] In some embodiments of methods, uses, pharmaceutical compositions for use or uses provided herein, the ADA2 protein can be a monomer or a dimer. For example, the ADA2 protein can be a dimer, in particular, a homodimer. In some embodiments of methods, uses, pharmaceutical compositions for use or combinations for use provided herein, the ADA2 protein can contain the sequence of amino acids set forth in any of SEQ ID NOS:5, 326-334, 340, 375 or 380-383, a sequence that can exhibit at least 85% sequence identity to the sequence of amino acids set forth in SEQ ID NOS:5, 326-334, 340, 375 or 380-383 or a catalytically active form thereof. For example, the ADA2 protein can contain a sequence of amino acids that can exhibit at least 86%, 87%, 88%, 89%, 90%, 91%, 92%, 93%, 94%, 95%, 96%, 97%, 98%, 99% or more sequence identity to the sequence of amino acids set forth in SEQ ID NOS:5, 326-334, 340, 375 or 380-383 or a catalytically active portion thereof. In particular examples, the ADA2 protein can contain a sequence of amino acids that can exhibit at least 86%, 87%, 88%, 89%, 90%, 91%, 92%, 93%, 94%, 95%, 96%, 97%, 98%, 99% or more sequence identity to the sequence of amino acids set forth in SEQ ID NOS:5 or a catalytically active portion thereof. For example, the ADA2 protein can contain the sequence of amino acids set forth in SEQ ID NO:5.

[0070] In some embodiments of methods, uses, pharmaceutical compositions for use, or combinations for use provided herein, the ADA2 protein is a variant ADA2 protein that includes modification(s) in the sequence of amino acids of an unmodified ADA2 polypeptide or a catalytically active portion thereof. In any of such examples, the unmodified ADA2 protein can include the sequence of amino acids set forth in SEQ ID NO:5, or a sequence of amino acids that can exhibit at least 85% sequence identity to the sequence of amino acids set forth in SEQ ID NO:5, or is a catalytically active portion thereof; the amino acid modification(s) are selected from among amino acid replacement(s), deletion(s) and insertion(s); and the variant ADA2 protein, when in dimer form, can exhibit adenosine deaminase activity to convert adenosine to inosine.

[0071] In some embodiments of methods, uses, pharmaceutical compositions for use or combinations for use provided herein, the ADA2 protein, when in dimer form, can exhibit a catalytic efficiency (k_{cat}/K_{M}) that is at least or at least about 5×10³ M⁻¹ s⁻¹, 6×10³ M⁻¹ s⁻¹, 7×10³ M⁻¹ s⁻¹, 8×10³ M⁻¹ s⁻¹, 9×10³ M⁻¹ s⁻¹, 1×10⁴ M⁻¹ s⁻¹, 2×10⁴ M⁻¹ s⁻¹, 3×10⁴ M⁻¹ s⁻¹, 4×10⁴ M⁻¹ s⁻¹, 5×10⁴ M⁻¹ s⁻¹, 6×10⁴ M⁻¹ s⁻¹, 7×10⁴ M⁻¹ s⁻¹, 8×10⁴ M⁻¹ s⁻¹, 9×10⁴ M⁻¹ s⁻¹, 1×10⁵ M⁻¹ s⁻¹, 2×10⁵ M⁻¹ s⁻¹, 3×10⁵ M⁻¹ s⁻¹, 4×10⁵ M⁻¹ s⁻¹, 5×10⁵ M⁻¹ s⁻¹, or greater.

[0072] In some embodiments of methods, uses, pharmaceutical compositions for use, or combinations for use provided herein, the modification(s) in the sequence of amino acids of an unmodified ADA2 polypeptide can include an amino acid replacement(s); and the variant ADA2 protein can include one or more amino acid replacement(s) at an amino acid position corresponding to amino acid residue 11, 13, 20, 22, 26, 86, 179, 217, 219, 221, 258, 262, 264, 266, 267, 277, 283, 296, 309, 317, 321, 352, 366, 371, 372, 373, 374, 403, 404, 405, 406, 441, 444, 452, 461, 469 or 470, with reference to amino acid positions set forth in SEQ ID NO:5.

[0073] For example, the variant ADA2 protein can include one or more amino acid replacement selected from among K11A, K11D, K11E, K13A, K13D, K13E, R20A, R20D, R20E, R20N, V22S, K26A, K26D, K26E, D86A, D86C, D86E, D86F, D86G, D86H, D86I, D86K, D86L, D86M, D86N, D86P, D86Q, D86R, D86S, D86T, D86V, D86W, D86Y, E179A, E179C, E179D, E179F, E179G, E179H, E179I, E179K, E179L, E179M, E179N, E179P, E179Q, E179R, E179S, E179T, E179V, E179W, E179Y, R217A, R217D, R217E, R219A, R219C, R219D, R219E, R219F, R219G, R219H, R219I, R219K, R219L, R219M, R219N, R219P, R219Q, R219S, R219T, R219V, R219W, R219Y, L221A, L221C, L221D, L221E, L221F, L221G, L221H, L221I, L221K, L221M, L221N, L221P, L221Q, L221R, L221S, L221T, L221V, L221W, L221Y, K258A, K258D, K258E, S262A, S262C, S262D, S262E, S262F, S262G, S262H, S262I, S262K, S262L, S262M, S262N, S262P, S262Q, S262R, S262T, S262V, S262W, S262Y, H264A, H264C, H264D, H264E, H264F, H264G, H264I, H264K, H264L, H264M, H264N, H264P, H264Q, H264R, H654S, H264T, H264V, H264W, H264Y, S266A, S266C, S266D, S266E, S266F, S266G, S266H, S266I, S266K, S266L, S266M, S266N, S266P, S266Q, S266R, S266T, S266V, S266W, S266Y, K267A, K267C, K267D, K267E, K267F, K267G, K267H, K267I, K267L, K267M, K267N, K267P, K267Q, K267R, K267S, K267T, K267V, K267W, K267Y, R277A, R277D, R277E, R283A, R283D, R283E, V296A, V296C, V296D, V296E, V296F, V296G, V296H, V296I, V296K, V296L, V296M, V296N, V296P, V296Q, V296R, V296S, V296T, V296W, V296Y, K309A, K309D, K309E, K317A, K317D, K317E, K321A, K321D, K321E, R352A, R352D, R352E, R366A, R366D, R366E, K371A, K371D, K371E, K371N, K372A, K372D, K372E, K372N, D373S, I374S, T403N, G404N, H405S, P406S, R441A, R441D, R441E, K444A, K444D, K444E, K452A, K452D, K452E, K461A, K461D, K461E, K469A, K469D, K469E, K470A, K470D, and K470E, with reference to amino acid positions set forth in SEQ ID NO:5.

[0074] In particular examples, the variant ADA2 protein can include one or more amino acid replacement(s) selected from among K11A, K11E, R20A, R20D, R20E, R219K, R219Q, L221A, L221V, L221G, S262N, H264Q, H264G, R366A, R366D, R366E, K371A, K371D, K371E, K372A, K372D, K372E, K452D and K452E, with reference to amino acid positions set forth in SEQ ID NO:5. In some embodiments of methods, uses, pharmaceutical compositions for use or combinations for use provided herein, the variant ADA2 protein can include amino acid replacements selected from among K11A/R20A, K11A/R20A/K371A, R20A/K371A, K11A/K371A, S262N/K371D, S262N/K371E, S262N/R20E, S262N/R20E/K371D, S262N/R20E/K371E, R219Q/K371E, R219Q/K371D, R219Q/R20E, R219Q/K371E/R20E, R219Q/K371D/R20E, R219Q/S262N/K371E, R219Q/S262N/K371D, R219Q/S262N/R20E, R219Q/S262N/K371E/R20E, R219Q/S262N/K371D/R20E and R219Q/S262N, with reference to amino acid positions set forth in SEQ ID NO:5.

[0075] In some embodiments of methods, uses, pharmaceutical compositions for use or combinations for use provided herein, the variant ADA2 protein can include a modification of one or more amino acids in the putative receptor binding (PRB) domain, such as an amino acid deletion, insertion or replacement. For example, the variant ADA2 can include deletion of one or more contiguous amino acid residues corresponding to any one or more contiguous amino acid residues between or between about amino acid residues 98 and 156 or amino acid residues 105 and 148, inclusive, with reference to amino acid positions set forth in SEQ ID NO:5. In any of such examples of methods, uses, pharmaceutical compositions for use or combinations for use provided herein, the variant of ADA2 protein can further include substitution of the deleted region with a peptide linker. For example, the peptide linker is selected from among (Gly)n (SEQ ID NO:368), where n is 2 to 20; (GGGGS)n (SEQ ID NO:343), where n is 1 to 6; (SSSSG)n (SEQ ID NO:344), where n is 1 to 6; (AlaAlaProAla)n (SEQ ID NO:350), where n is 1 to 6; GKSSGSGSESKS (SEQ ID NO:345); GGSTSGSGKSSEGKG (SEQ ID NO:346); GSTSGSGKSSSEGSGSTKG (SEQ ID NO:347); GSTSGSGKPGSGEGSTKG (SEQ ID NO:348); and EGKSSGSGSESKEF (SEQ ID NO:349). In particular examples the peptide linker is selected from among GGG (SEQ ID NO:369); GGGGG (SEQ ID NO:360); GGGGGGG (SEQ ID NO:370); GGGGGGGGGG (SEQ ID NO:371); and GGGGGGGGGGGGGGG (SEQ ID NO:372).

[0076] For example, the modification in the PRB domain of the ADA2 protein corresponds to C105-T147del→(Gly), where n is 2 to 20, such as C105-T147del→(Gly)₁₅, C105-T147del→(Gly)₁₀, C105-T147del→(Gly)₇, C105-T147del→(Gly)₅ or C105-T147del→(Gly)₃, with reference to amino acid positions set forth in SEQ ID NO:5.

[0077] In some embodiments of methods, uses, pharmaceutical compositions for use or combinations for use provided herein, the ADA2 protein can be glycosylated at one or more native or non-native glycosylation sites. For example, in some embodiments provided herein containing a variant ADA2 protein, the variant ADA2 protein includes a modification(s) that alters glycosylation by introduction of a non-native glycosylation site. For example, the non-native glycosylation site is introduced by amino acid replacement(s) or insertion of one, two or three amino acids. In particular examples, the modifications that alter glycosylation are selected from among modifications corresponding to--→N1/--→A2/--→S3, R20N/V22S, K371N/D373S, K372N/I374S, T403N/H405S and G404N/P406S, with reference to amino acid positions set forth in SEQ ID NO:5.

[0078] In some embodiments of methods, uses, pharmaceutical compositions for use or combinations for use provided herein, the variant ADA2 can include a polypeptide that has the sequence of amino acids set forth in any of SEQ ID NOS: 13-63 or 71-285 or a catalytically active portion thereof.

[0079] In some embodiments of methods, uses, pharmaceutical compositions for use or uses provided herein, the subject can be a mammal, in particular a human. In some embodiments of methods provided herein, the pharmaceutical composition can be administered parenterally, locally, or systemically. For example, the pharmaceutical composition can be administered intranasally, intramuscularly, intradermally, intraperitoneally, intravenously, subcutaneously, orally, or by pulmonary administration.

[0080] In some embodiments, in the variant ADA2 protein or catalytically active portion thereof provided herein, the variant ADA2 protein in the methods, compositions, conjugates, modified forms, vectors, cells, combinations, uses and compositions for use, and the nucleic acids encoding the variant ADA2 provided herein and vectors that include the nucleic acids, the modifications can be from any one or more of the following amino acid replacement(s), insertion(s), deletion(s), and any combination thereof. The modification(s) listed below are with reference to mature numbering, as set forth in the amino acid positions set forth in SEQ ID NO:5.

Exemplary of ADA2 variants provided herein are the following; it is understood that the different types of mutants (amino acid modifications) can be combined to exploit the properties of each type of mutation. It is understood by those of skill in the art that, in general, the effects of mutations in proteins are at least additive, and can be synergistic.

[0081] 1. Heparin Binding Mutants

[0082] The following modifications can confer reduced heparin binding. Binding to heparin can deplete circulating levels of administered ADA2. Thus, the following ADA2 variants can increase the bioavailability and pharmacokinetics of the administered ADA2: K11A; K11D; K11E; K13A; K13D; K13E; K371A; K371D; K371E; K372A; K372D; K372E; K452A; K452D; K452E; R20A; R20D; R20E; R366A; R366D; R366E; K26A; K26D; K26E; R217A; R217D; R217E; K258A; K258D; K258E; R277A; R277D; R277E; R283A; R283D; R283E; K309A; K309D; K309E; K317A; K317D; K317E; K321A; K321D; K321E; R352A; R352D; R352E; R441A; R441D; R441E; K444A; K444D; K444E; K461A; K461D; K461E; K469A; K469D; K469E; K470A; K470D; and K470E.

[0083] Examples of Heparin Binding Mutants Containing these Replacements:

[0084] K11A (SEQ ID NO:13); K11D (SEQ ID NO:14); K11E (SEQ ID NO:15); K13A (SEQ ID NO: 16); K13D (SEQ ID NO: 17); K13E (SEQ ID NO: 18); K371A (SEQ ID NO: 19); K371D (SEQ ID NO:20); K371E (SEQ ID NO:21); K372A (SEQ ID NO:22); K372D (SEQ ID NO:23); K372E (SEQ ID NO:24); K452A (SEQ ID NO:25); K452D (SEQ ID NO:26); K452E (SEQ ID NO:27); R20A (SEQ ID NO:28); R20D (SEQ ID NO:29); R20E (SEQ ID NO:30); R366A (SEQ ID NO:31); R366D (SEQ ID NO:32); R366E (SEQ ID NO:33); K26A (SEQ ID NO:71); K26D (SEQ ID NO:72); K26E (SEQ ID NO:73); R217A (SEQ ID NO:74); R217D (SEQ ID NO:75); R217E (SEQ ID NO:76); K258A (SEQ ID NO:77); K258D (SEQ ID NO:78); K258E (SEQ ID NO:79); R277A (SEQ ID NO: 80); R277D (SEQ ID NO:81); R277E (SEQ ID NO: 82); R283A (SEQ ID NO: 83); R283D (SEQ ID NO: 84); R283E (SEQ ID NO:85); K309A (SEQ ID NO:86); K309D (SEQ ID NO:87); K309E (SEQ ID NO:88); K317A (SEQ ID NO:89); K317D (SEQ ID NO:90); K317E (SEQ ID NO:91); K321A (SEQ ID NO: 92); K321D (SEQ ID NO: 93); K321E (SEQ ID NO: 94); R352A (SEQ ID NO: 95); R352D (SEQ ID NO: 96); R352E (SEQ ID NO:97); R441A (SEQ ID NO:98); R441D (SEQ ID NO:99); R441E (SEQ ID NO:100); K444A (SEQ ID NO:101); K444D (SEQ ID NO: 102); K444E (SEQ ID NO: 103); K461A (SEQ ID NO: 104); K461D (SEQ ID NO: 105); K461E (SEQ ID NO: 106); K469A (SEQ ID NO: 107); K469D (SEQ ID NO: 108); K469E (SEQ ID NO:109); K470A (SEQ ID NO: 110); K470D (SEQ ID NO: 111); and K470E (SEQ ID NO:112).

[0085] 2. Active Site Mutants

[0086] The following modifications can confer increased catalytic efficiency. The modifications are in select residues of the active site, and can effect improved catalytic efficiency (k_{cat}/Kₘ) for adenosine. Binding to heparin can deplete circulating levels of administered ADA2. Thus, the following ADA2 variants can confer increased adenosine deaminase activity: H264A; H264Q; H264N; H264G; R219K; R219Q; R219N; R219A; L221A; L221V; L221G; E179D; E179A; E179S; E179T; E179V; E179G; S262A; S262V; S262M; S262N; D86A; D86C; D86E; D86F; D86G; D86H; D86I; D86K; D86L; D86M; D86N; D86P; D86Q; D86R; D86S; D86T; D86V; D86W; D86Y; E179C; E179F; E179H; E179I; E179K; E179L; E179M; E179N; E179P; E179Q; E179R; E179W; E179Y; R219C; R219D; R219E; R219F; R219G; R219H; R219I; R219L; R219M; R219P; R219S; R219T; R219V; R219W; R219Y; L221C; L221D; L221E; L221F; L221H; L221I; L221K; L221M; L221N; L221P; L221Q; L221R; L221S; L221T; L221W; L221Y; S262C; S262D; S262E; S262F; S262G; S262H; S262I; S262K; S262L; S262P; S262Q; S262R; S262T; S262W; S262Y; H264C; H264D; H264E; H264F; H264I; H264K; H264L; H264M; H264P; H264R; H264S; H264T; H264V; H264W; H264Y; S266A; S266C; S266D; S266E; S266F; S266G; S266H; S266I; S266K; S266L; S266M; S266N; S266P; S266Q; S266R; S266T; S266V; S266W; S266Y; K267A; K267C; K267D; K267E; K267F; K267G; K267H; K267I; K267L; K267M; K267N; K267P; K267Q; K267R; K267S; K267T; K267V; K267W; K267Y; V296A; V296C; V296D; V296E; V296F; V296G; V296H; V296I; V296K; V296L; V296M; V296N; V296P; V296Q; V296R; V296S; V296T; V296W; and V296Y.

[0087] Examples of Active Site Mutants Containing these Replacements:

[0088] H264A (SEQ ID NO:34); H264Q (SEQ ID NO:35); H264N (SEQ ID NO:36); H264G (SEQ ID NO:37); R219K (SEQ ID NO:38); R219Q (SEQ ID NO:39); R219N (SEQ ID NO: 40); R219A (SEQ ID NO:41); L221A (SEQ ID NO:42); L221V (SEQ ID NO:43); L221G (SEQ ID NO:44); E179D (SEQ ID NO:45); E179A (SEQ ID NO:46); E179S (SEQ ID NO:47); E179T (SEQ ID NO:48); E179V (SEQ ID NO:49); E179G (SEQ ID NO:50); S262A (SEQ ID NO:51); S262V (SEQ ID NO:52); S262M (SEQ ID NO:53); S262N (SEQ ID NO:54); D86A (SEQ ID NO: 113); D86C (SEQ ID NO: 114); D86E (SEQ ID NO: 115); D86F (SEQ ID NO: 116); D86G (SEQ ID NO: 117); D86H (SEQ ID NO: 118); D86I (SEQ ID NO: 119); D86K (SEQ ID NO: 120); D86L (SEQ ID NO:121); D86M (SEQ ID NO: 122); D86N (SEQ ID NO: 123); D86P (SEQ ID NO: 124); D86Q (SEQ ID NO: 125); D86R (SEQ ID NO: 126); D86S (SEQ ID NO: 127); D86T (SEQ ID NO: 128); D86V (SEQ ID NO: 129); D86W (SEQ ID NO:130); D86Y (SEQ ID NO:131); E179C (SEQ ID NO: 132); E179F (SEQ ID NO: 133); E179H (SEQ ID NO:134); E179I (SEQ ID NO:135); E179K (SEQ ID NO:136); E179L (SEQ ID NO:137); E179M (SEQ ID NO:138); E179N (SEQ ID NO: 139); E179P (SEQ ID NO: 140); E179Q (SEQ ID NO:141); E179R (SEQ ID NO: 142); E179W (SEQ ID NO: 143); E179Y (SEQ ID NO: 144); R219C (SEQ ID NO: 145); R219D (SEQ ID NO: 146); R219E (SEQ ID NO: 147); R219F (SEQ ID NO: 148); R219G (SEQ ID NO: 149); R219H (SEQ ID NO:150); R219I (SEQ ID NO:151); R219L (SEQ ID NO:152); R219M (SEQ ID NO:153); R219P (SEQ ID NO: 154); R219S (SEQ ID NO: 155); R219T (SEQ ID NO:156); R219V (SEQ ID NO:157); R219W (SEQ ID NO: 158); R219Y (SEQ ID NO:159); L221C (SEQ ID NO: 160); L221D (SEQ ID NO:161); L221E (SEQ ID NO: 162); L221F (SEQ ID NO: 163); L221H (SEQ ID NO: 164); L221I (SEQ ID NO: 165); L221K (SEQ ID NO: 166); L221M (SEQ ID NO: 167); L221N (SEQ ID NO:168); L221P (SEQ ID NO: 169); L221Q (SEQ ID NO:170); L221R (SEQ ID NO:171); L221S (SEQ ID NO:172); L221T (SEQ ID NO:173); L221W (SEQ ID NO: 174); L221Y (SEQ ID NO: 175); S262C (SEQ ID NO: 176); S262D (SEQ ID NO: 177); S262E (SEQ ID NO: 178); S262F (SEQ ID NO: 179); S262G (SEQ ID NO: 180); S262H (SEQ ID NO:181); S262I (SEQ ID NO: 182); S262K (SEQ ID NO:183); S262L (SEQ ID NO: 184); S262P (SEQ ID NO: 185); S262Q (SEQ ID NO: 186); S262R (SEQ ID NO:187); S262T (SEQ ID NO: 188); S262W (SEQ ID NO: 189); S262Y (SEQ ID NO: 190); H264C (SEQ ID NO:191); H264D (SEQ ID NO: 192); H264E (SEQ ID NO: 193); H264F (SEQ ID NO: 194); H264I (SEQ ID NO: 195); H264K (SEQ ID NO: 196); H264L (SEQ ID NO: 197); H264M (SEQ ID NO: 198); H264P (SEQ ID NO: 199); H264R (SEQ ID NO:200); H264S (SEQ ID NO:201); H264T (SEQ ID NO:202); H264V (SEQ ID NO:203); H264W (SEQ ID NO:204); H264Y (SEQ ID NO:205); S266A (SEQ ID NO:206); S266C (SEQ ID NO:207); S266D (SEQ ID NO:208); S266E (SEQ ID NO:209); S266F (SEQ ID NO:210); S266G (SEQ ID NO:211); S266H (SEQ ID NO:212); S266I (SEQ ID NO:213); S266K (SEQ ID NO:214); S266L (SEQ ID NO:215); S266M (SEQ ID NO:216); S266N (SEQ ID NO:217); S266P (SEQ ID NO:218); S266Q (SEQ ID NO:219); S266R (SEQ ID NO:220); S266T (SEQ ID NO:221); S266V (SEQ ID NO:222); S266W (SEQ ID NO:223); S266Y (SEQ ID NO:224); K267A (SEQ ID NO:225); K267C (SEQ ID NO:226); K267D (SEQ ID NO:227); K267E (SEQ ID NO:228); K267F (SEQ ID NO:229); K267G (SEQ ID NO:230); K267H (SEQ ID NO:231); K267I (SEQ ID NO:232); K267L (SEQ ID NO:233); K267M (SEQ ID NO:234); K267N (SEQ ID NO:235); K267P (SEQ ID NO:236); K267Q (SEQ ID NO:237); K267R (SEQ ID NO:238); K267S (SEQ ID NO:239); K267T (SEQ ID NO:240); K267V (SEQ ID NO:241); K267W (SEQ ID NO:242); K267Y (SEQ ID NO:243); V296A (SEQ ID NO:244); V296C (SEQ ID NO:245); V296D (SEQ ID NO:246); V296E (SEQ ID NO:247); V296F (SEQ ID NO:248); V296G (SEQ ID NO:249); V296H (SEQ ID NO:250); V296I (SEQ ID NO:251); V296K (SEQ ID NO:252); V296L (SEQ ID NO:253); V296M (SEQ ID NO:254); V296N (SEQ ID NO:255); V296P (SEQ ID NO:256); V296Q (SEQ ID NO:257); V296R (SEQ ID NO:258); V296S (SEQ ID NO:259); V296T (SEQ ID NO:260); V296W (SEQ ID NO:261); and V296Y (SEQ ID NO: 262).

[0089] 3. Hyperglycosylation Mutants

[0090] The following modifications introduce a non-native glycosylation site in ADA2. Introduction of non-native glycosylation sites, such as N-linked glycosylation sites, can confer an increase in stability and pharmacokinetic profiles. Thus, the following ADA2 variants can effect hyperglycosylation of ADA2, and increase the stability and pharmacokinetic profiles of the administered ADA2:

[0091] --→N1/--→A2/--→S3; R20N/V22S; K371N/D373S; K372N/1374S; T403N/H405S; and G404N/P406S.

[0092] Examples of Hyperglycosylation Mutants Containing these Replacements:

[0093] --→N1/--→A2/--→S3 (SEQ ID NO:274); R20N/V22S (SEQ ID NO:275); K371N/D373S (SEQ ID NO:276); K372N/I374S (SEQ ID NO:277); T403N/H405S (SEQ ID NO:278); and G404N/P406S (SEQ ID NO:279).

[0094] 4. PRB Deletion and Replacement Mutants

[0095] The following variants contain a modified PRB domain. The modifications of the PRB domain can include deletion of all or a portion of the PRB domain (i.e. deletion of one or more residues of the PRB domain), insertion of one or more amino acid residues into the PRB domain, amino acid replacement of one or more residues of the PRB domain or a combination thereof. Deletion and/or substitution of the PRB domain can confer altered activity, e.g., reduction in binding to a receptor and/or the activity mediated by the receptor.

[0096] C105-T147del→(Gly)n, where n=2 to 20; C105-T147del→(Gly)15; C105-T147del→(Gly)10; C105-T147del→(Gly)7; C105-T147del→(Gly)5; C105-T147del→(Gly)3; N98-N156del; C105-E148del; C105-T147del; V99-Q144del; V99-Q144del→(GGGGS)n, where n=1 to 5; C105-T147del→(GGGGS)n, where n=1 to 5; V99-Q144del→(GGGGS)1; V99-Q144del→(GGGGS)2; V99-Q144del→(GGGGS)3; C105-T147del→(GGGGS)1; C105-T147del→(GGGGS)2; and C105-T147del→(GGGGS)3.

[0097] Examples of PRB Deletion and Replacement Mutants Containing these Replacements:

[0098] C105-T147del→(Gly)n (SEQ ID NO:280); C105-T147del→(Gly)15 (SEQ ID NO:281); C105-T147del→(Gly)10 (SEQ ID NO:282); C105-T147del→(Gly)7 (SEQ ID NO:283); C105-T147del→(Gly)5 (SEQ ID NO:284); C105-T147del→(Gly)3 (SEQ ID NO:285); N98-N156del (SEQ ID NO:548); C105-E148del (SEQ ID NO:549); C105-T147del (SEQ ID NO:550); V99-Q144del (SEQ ID NO:579); V99-Q144del→(GGGGS)n, where n=1 to 5 (SEQ ID NO:581); C105-T147del→(GGGGS)n, where n=1 to 5 (SEQ ID NO:582); V99-Q144del→(GGGGS)1 (SEQ ID NO:583); V99-Q144del→(GGGGS)2 (SEQ ID NO:584); V99-Q144del→(GGGGS)3 (SEQ ID NO:585); C105-T147del→(GGGGS)1 (SEQ ID NO:586); C105-T147del→(GGGGS)2 (SEQ ID NO:587); and C105-T147del→(GGGGS)3 (SEQ ID NO:588)

[0099] 5. PRB Hyperglycosylation Mutants

[0100] The following modifications can introduce a non-native glycosylation site in the PRB domain. Introduction of non-native glycosylation sites, such as N-linked glycosylation sites, in the PRB domain can confer an increase in stability and pharmacokinetic profiles and/or other activities, e.g., reduction in binding to a receptor. Thus, the following ADA2 variants can effect hyperglycosylation of the ADA2 in the PRB domain, reduce receptor binding, and increase the stability and pharmacokinetic profiles of the administered ADA2: R125N/P126A; S127N/K129S; P126N/E128T; R112N/I114T; I134N/L135C/L136T; I134N/L135S/L136T; R142N/Q144S; E137N/Y139T; and P111N/G113S.

[0101] Examples of PRB Hyperglycosylation Mutants Containing these Replacements:

[0102] R125N/P126A (SEQ ID NO:552); S127N/K129S (SEQ ID NO:553); P126N/E128T (SEQ ID NO:554); R112N/I114T (SEQ ID NO:555); I134N/L135C/L136T (SEQ ID NO:556); I134N/L135S/L136T (SEQ ID NO:557); R142N/Q144S (SEQ ID NO:558); E137N/Y139T (SEQ ID NO:559); and P111N/G113S (SEQ ID NO:560).

[0103] 6. PRB-ADA Domain Interaction Mutants

[0104] The following modifications can confer altered interaction between the PRB domain and the rest of ADA2 (e.g., the adenosine deaminase (ADA) domain). Altering the interaction between PRB domain and the rest of ADA2, such as the ADA domain, can confer an activity, e.g., an increase in the adenosine deaminase activity and a reduction in receptor binding:

[0105] F119S; F119K; Y224R; Y224N; Y191S; Y191D; F183K; Y191D/Y224R; F109S; F109A; R118D; R118A; Y139T; Y139A; W133S; W133T; P124A; and P124S.

[0106] Examples of PRB-ADA Domain Interaction Mutants Containing these Replacements:

[0107] F119S (SEQ ID NO:561); F119K (SEQ ID NO:562); Y224R (SEQ ID NO:563); Y224N (SEQ ID NO:564); Y191S (SEQ ID NO:565); Y191D (SEQ ID NO:566); F183K (SEQ ID NO:567); Y191D/Y224R (SEQ ID NO:568); F109S (SEQ ID NO:569); F109A (SEQ ID NO:570); R118D (SEQ ID NO:571); R118A (SEQ ID NO:572); Y139T (SEQ ID NO:573); Y139A (SEQ ID NO:574); W133S (SEQ ID NO:575); W133T (SEQ ID NO:576); P124A (SEQ ID NO:577); and P124S (SEQ ID NO:578).

[0108] 7. Combinations of Mutations with Hyperglycosylation Mutants

[0109] The following variants combine modifications that effect improved catalytic efficiency (kcat/Km) for adenosine, such as R219Q and/or S262N, with modifications that introduce non-native glycosylation sites:

[0110] R219Q/S262N/--→N1/--→A2/--→S3; R219Q/S262N/R20N/V22S; R219Q/S262N/K371N/D373S; R219Q/S262N/K372N/1374S; R219Q/S262N/T403N/H405S; and R219Q/S262N/G404N/P406S.

[0111] Combination with Hyperglycosylation Mutants Containing these Replacements:

[0112] R219Q/S262N/--→N1/--→A2/--→S3 (SEQ ID NO:596); R219Q/S262N/R20N/V22S (SEQ ID NO:597); R219Q/S262N/K371N/D373S (SEQ ID NO:598); R219Q/S262N/K372N/I374S (SEQ ID NO:599); R219Q/S262N/T403N/H405S (SEQ ID NO:600); and R219Q/S262N/G404N/P406S (SEQ ID NO:601).

[0113] 8. Combinations of Mutations with PRB Hyperglycosylation Mutants

[0114] The following variants combine modifications that effect improved catalytic efficiency (kcat/Km) for adenosine, such as R219Q and/or S262N, with modifications that introduce non-native glycosylation sites in the PRB domain:

[0115] R219Q/S262N/R125N/P126A; R219Q/S262N/S127N/K129S; R219Q/S262N/P126N/E128T; R219Q/S262N/R112N/I114T; R219Q/S262N/I134N/L135C/L136T; R219Q/S262N/1134N/L135S/L136T; R219Q/S262N/R142N/Q144S; R219Q/S262N/E137N/Y139T; and R219Q/S262N/P111N/G113S.

[0116] Examples of Combinations with PRB Hyperglycosylation Mutants Containing these Replacements:

[0117] R219Q/S262N/R125N/P126A (SEQ ID NO:607); R219Q/S262N/S127N/K129S (SEQ ID NO:608); R219Q/S262N/P126N/E128T (SEQ ID NO:609); R219Q/S262N/R112N/I114T (SEQ ID NO:610); R219Q/S262N/I134N/L135C/L136T (SEQ ID NO:611); R219Q/S262N/I134N/L135S/L136T (SEQ ID NO:612); R219Q/S262N/R142N/Q144S (SEQ ID NO:613); R219Q/S262N/E137N/Y139T (SEQ ID NO:614); and R219Q/S262N/P111N/G113S (SEQ ID NO:615).

[0118] 9. Combinations with PRB-ADA Domain Interaction Mutants

[0119] The following variants combine modifications that effect improved catalytic efficiency (kcat/Km) for adenosine, such as R219Q and/or S262N, with modifications that alter the interaction between the PRB domain and the rest of ADA2 (e.g., the adenosine deaminase (ADA) domain):

[0120] R219Q/S262N/F119S; R219Q/S262N/F119K; R219Q/S262N/Y224R; R219Q/S262N/Y224N; R219Q/S262N/Y191S; R219Q/S262N/Y191D; R219Q/S262N/F183K; R219Q/S262N/Y191D/Y224R; R219Q/S262N/F109S; R219Q/S262N/F109A; R219Q/S262N/R118D; R219Q/S262N/R118A; R219Q/S262N/Y139T; R219Q/S262N/Y139A; R219Q/S262N/W133S; R219Q/S262N/W133T; R219Q/S262N/P124A; and R219Q/S262N/P124S.

[0121] Combinations with PRB-ADA Domain Interaction Mutants Containing these Replacements:

[0122] R219Q/S262N/F119S (SEQ ID NO:616); R219Q/S262N/F119K (SEQ ID NO:617); R219Q/S262N/Y224R (SEQ ID NO:618); R219Q/S262N/Y224N (SEQ ID NO:619); R219Q/S262N/Y191S (SEQ ID NO:620); R219Q/S262N/Y191D (SEQ ID NO:621); R219Q/S262N/F183K (SEQ ID NO:622); R219Q/S262N/Y191D/Y224R (SEQ ID NO:623); R219Q/S262N/F109S (SEQ ID NO:624); R219Q/S262N/F109A (SEQ ID NO: 625); R219Q/S262N/R118D (SEQ ID NO:626); R219Q/S262N/R118A (SEQ ID NO: 627); R219Q/S262N/Y139T (SEQ ID NO:628); R219Q/S262N/Y139A (SEQ ID NO: 629); R219Q/S262N/W133S (SEQ ID NO:630); R219Q/S262N/W133T (SEQ ID NO:631); R219Q/S262N/P124A (SEQ ID NO:632); and R219Q/S262N/P124S (SEQ ID NO:633).

[0123] 10. Combinations with PRB Deletion Mutants

[0124] The following variants combine modifications that effect improved catalytic efficiency (kcat/Km) for adenosine, such as R219Q and/or S262N, and/or modifications that confer reduced heparin binding, such as K371D, with modifications, e.g., deletions, insertions, substitutions, and/or replacements, in the PRB domain:

[0125] K371D/V99-Q144del→(GGGGS)1; K371D/V99-Q144del→(GGGGS)2; K371D/V99-Q144del→(GGGGS)3; K371D/C105-T147del→(GGGGS)1; K371D/C105-T147del→(GGGGS)2; K371D/C105-T147del→(GGGGS)3; R219Q/S262N/C105-T147del→(Gly)15; R219Q/S262N/C105-T147del→(Gly)10; R219Q/S262N/C105-T147del→(Gly)7; R219Q/S262N/C105-T147del→(Gly)5; R219Q/S262N/C105-T147del→(Gly)3; R219Q/S262N/V99-Q144del→(GGGGS)1; R219Q/S262N/V99-Q144del→(GGGGS)2; R219Q/S262N/V99-Q144del→(GGGGS)3; R219Q/S262N/C105-T147del→(GGGGS)1; R219Q/S262N/C105-T147del→(GGGGS)2; R219Q/S262N/C105-T147del→(GGGGS)3; R219Q/S262N/K371D/V99-Q144del→(GGGGS)1; R219Q/S262N/K371D/V99-Q144del→(GGGGS)2; R219Q/S262N/K371D/V99-Q144del→(GGGGS)3; R219Q/S262N/K371D/C105-T147del→(GGGGS)1; R219Q/S262N/K371D/C105-T147del→(GGGGS)2; R219Q/S262N/K371D/C105-T147del→(GGGGS)3; K371D/C105-T147del→(Gly)n, where n=2 to 20; K371D/C105-T147del→(Gly)15; K371D/C105-T147del→(Gly)10; K371D/C105-T147del→(Gly)7; K371D/C105-T147del→(Gly)5; K371D/C105-T147del→(Gly)3; K371D/V99-Q144del→(GGGGS)n, where n=1 to 5; K371D/C105-T147del→(GGGGS)n, where n=1 to 5; K371D/N98-N156del; K371D/C105-E148del; K371D/C105-T147del; K371D/V99-Q144del; R219Q/S262N/C105-T147del→(Gly)n, where n=2 to 20; R219Q/S262N/V99-Q144del→(GGGGS)n, where n=1 to 5; R219Q/S262N/C105-T147del→(GGGGS)n, where n=1 to 5; R219Q/S262N/N98-N156del; R219Q/S262N/C105-E148del; R219Q/S262N/C105-T147del; R219Q/S262N/V99-Q144del; R219Q/S262N/K371D/C105-T147del→(Gly)n, where n=2 to 20; R219Q/S262N/K371D/C105-T147del→(Gly)15; R219Q/S262N/K371D/C105-T147del→(Gly)10; R219Q/S262N/K371D/C105-T147del→(Gly)7; R219Q/S262N/K371D/C105-T147del→(Gly)5; R219Q/S262N/K371D/C105-T147del→(Gly)3; R219Q/S262N/K371D/V99-Q144del→(GGGGS)n, where n=1 to 5; R219Q/S262N/K371D/C105-T147del→(GGGGS)n, where n=1 to 5; R219Q/S262N/K371D/N98-N156del; R219Q/S262N/K371D/C105-E148del; R219Q/S262N/K371D/C105-T147del; R219Q/S262N/K371D/V99-Q144del; R219Q/C105-T147del→(Gly)n, where n=2 to 20; R219Q/V99-Q144del→(GGGGS)n, where n=1 to 5; R219Q/C105-T147del→(GGGGS)n, where n=1 to 5; R219Q/N98-N156del; R219Q/C105-E148del; R219Q/C105-T147del; R219Q/V99-Q144del; S262N/C105-T147del→(Gly)n, where n=2 to 20; S262N/V99-Q144del→(GGGGS)n, where n=1 to 5; S262N/C105-T147del→(GGGGS)n, where n=1 to 5; S262N/N98-N156del; and S262N/C105-E148del; S262N/C105-T147del; and S262N/V99-Q144del.

[0126] Examples of Combination with PRB Deletion Mutants Containing these Replacements:

[0127] K371D/V99-Q144del→(GGGGS)1 (SEQ ID NO:589); K371D/V99-Q144del→(GGGGS)2 (SEQ ID NO:590); K371D/V99-Q144del→(GGGGS)3 (SEQ ID NO:591); K371D/C105-T147del→(GGGGS)1 (SEQ ID NO:592); K371D/C105-T147del→(GGGGS)2 (SEQ ID NO:593); K371D/C105-T147del→(GGGGS)3 (SEQ ID NO:594); R219Q/S262N/C105-T147del→(Gly)15 (SEQ ID NO:602); R219Q/S262N/C105-T147del→(Gly)10 (SEQ ID NO:603); R219Q/S262N/C105-T147del→(Gly)7 (SEQ ID NO:604); R219Q/S262N/C105-T147del→(Gly)5 (SEQ ID NO:605); R219Q/S262N/C105-T147del→(Gly)3 (SEQ ID NO:606); R219Q/S262N/V99-Q144del→(GGGGS)1 (SEQ ID NO:634); R219Q/S262N/V99-Q144del→(GGGGS)2 (SEQ ID NO:635); R219Q/S262N/V99-Q144del→(GGGGS)3 (SEQ ID NO:636); R219Q/S262N/C105-T147del→(GGGGS)1 (SEQ ID NO:637); R219Q/S262N/C105-T147del→(GGGGS)2 (SEQ ID NO:638); R219Q/S262N/C105-T147del→(GGGGS)3 (SEQ ID NO:639); R219Q/S262N/K371D/V99-Q144del→(GGGGS)1 (SEQ ID NO: 640); R219Q/S262N/K371D/V99-Q144del→(GGGGS)2 (SEQ ID NO:641); R219Q/S262N/K371D/V99-Q144del→(GGGGS)3 (SEQ ID NO: 642); R219Q/S262N/K371D/C105-T147del→(GGGGS)1 (SEQ ID NO: 643); R219Q/S262N/K371D/C105-T147del→(GGGGS)2 (SEQ ID NO: 644); R219Q/S262N/K371D/C105-T147del→(GGGGS)3 (SEQ ID NO:645); K371D/C105-T147del→(Gly)n, where n=2 to 20 (SEQ ID NO:646); K371D/C105-T147del→(Gly)15 (SEQ ID NO:647); K371D/C105-T147del→(Gly)10 (SEQ ID NO:648); K371D/C105-T147del→(Gly)7 (SEQ ID NO:649); K371D/C105-T147del→(Gly)5 (SEQ ID NO:650); K371D/C105-T147del→(Gly)3 (SEQ ID NO:651); K371D/V99-Q144del→(GGGGS)n, where n=1 to 5 (SEQ ID NO:652); K371D/C105-T147del→(GGGGS)n, where n=1 to 5 (SEQ ID NO:653); K371D/N98-N156del (SEQ ID NO:654); K371D/C105-E148del (SEQ ID NO:655); K371D/C105-T147del (SEQ ID NO:656); K371D/V99-Q144del (SEQ ID NO:657); R219Q/S262N/C105-T147del→(Gly)n, where n=2 to 20 (SEQ ID NO: 658); R219Q/S262N/V99-Q144del→(GGGGS)n, where n=1 to 5 (SEQ ID NO:664); R219Q/S262N/C105-T147del→(GGGGS)n, where n=1 to 5 (SEQ ID NO:665); R219Q/S262N/N98-N156del (SEQ ID NO:666); R219Q/S262N/C105-E148del (SEQ ID NO:667); R219Q/S262N/C105-T147del (SEQ ID NO:668); R219Q/S262N/V99-Q144del (SEQ ID NO:669); R219Q/S262N/K371D/C105-T147del→(Gly)n, where n=2 to 20 (SEQ ID NO:670); R219Q/S262N/K371D/C105-T147del→(Gly)15 (SEQ ID NO:671); R219Q/S262N/K371D/C105-T147del→(Gly)10 (SEQ ID NO:672); R219Q/S262N/K371D/C105-T147del→(Gly)7 (SEQ ID NO: 673); R219Q/S262N/K371D/C105-T147del→(Gly)5 (SEQ ID NO:674); R219Q/S262N/K371D/C105-T147del→(Gly)3 (SEQ ID NO:675); R219Q/S262N/K371D/V99-Q144del→(GGGGS)n, where n=1 to 5 (SEQ ID NO: 676); R219Q/S262N/K371D/C105-T147del→(GGGGS)n, where n=1 to 5 (SEQ ID NO:677); R219Q/S262N/K371D/N98-N156del (SEQ ID NO:678); R219Q/S262N/K371D/C105-E148del (SEQ ID NO:679); R219Q/S262N/K371D/C105-T147del (SEQ ID NO:680); R219Q/S262N/K371D/V99-Q144del (SEQ ID NO:681); R219Q/C105-T147del→(Gly)n, where n=2 to 20 (SEQ ID NO:918); R219Q/V99-Q144del→(GGGGS)n, where n=1 to 5 (SEQ ID NO:919); R219Q/C105-T147del→(GGGGS)n, where n=1 to 5 (SEQ ID NO:920); R219Q/N98-N156del (SEQ ID NO:921); R219Q/C105-E148del (SEQ ID NO:922); R219Q/C105-T147del (SEQ ID NO:923); R219Q/V99-Q144del (SEQ ID NO:924); S262N/C105-T147del→(Gly)n, where n=2 to 20 (SEQ ID NO:925); S262N/V99-Q144del→(GGGGS)n, where n=1 to 5 (SEQ ID NO:926); S262N/C105-T147del→(GGGGS)n, where n=1 to 5 (SEQ ID NO:927); S262N/N98-N156del (SEQ ID NO:928); S262N/C105-E148del (SEQ ID NO:929); S262N/C105-T147del (SEQ ID NO:930); and S262N/V99-Q144del (SEQ ID NO:931).

[0128] 11. Other Combination Mutants

[0129] The following variants combine various modifications, such as modifications that effect improved catalytic efficiency (kcat/Km) for adenosine, such as R219Q and/or S262N, modifications that confer reduced heparin binding, such as K371D, and other modifications:

[0130] K11A/R20A; K11A/R20A/K371A; R20A/K371A; K11A/K371A; S262N/K371D; S262N/K371E; S262N/R20E; S262N/R20E/K371D; S262N/R20E/K371E; R219Q/K371E; R219Q/K371D; R219Q/R20E; R219Q/K371E/R20E; R219Q/K371D/R20E; R219Q/S262N/K371E; R219Q/S262N/K371D; R219Q/S262N/R20E; R219Q/S262N/K371E/R20E; R219Q/S262N/K371D/R20E; R219Q/S262N; R219Q/S262N/K11A; R219Q/S262N/K11D; R219Q/S262N/K11E; R219Q/S262N/K13A; R219Q/S262N/K13D; R219Q/S262N/K13E; R219Q/S262N/K371A; R219Q/S262N/K372A; R219Q/S262N/K372D; R219Q/S262N/K372E; R219Q/S262N/K452A; R219Q/S262N/K452D; R219Q/S262N/K452E; R219Q/S262N/R20A; R219Q/S262N/R20D; R219Q/S262N/R366A; R219Q/S262N/R366D; R219Q/S262N/R366E; R219Q/S262N/H264A; R219Q/S262N/H264Q; R219Q/S262N/H264N; R219Q/S262N/H264G; R219K/S262N; R219N/S262N; R219A/S262N; R219Q/S262N/L221A; R219Q/S262N/L221V; R219Q/S262N/L221G; R219Q/S262N/E179D; R219Q/S262N/E179A; R219Q/S262N/E179S; R219Q/S262N/E179T; R219Q/S262N/E179V; R219Q/S262N/E179G; R219Q/S262A; R219Q/S262V; R219Q/S262M; R219Q/S262N/K11A/R20A; R219Q/S262N/K11A/R20A/K371A; R219Q/S262N/R20A/K371A; R219Q/S262N/K11A/K371A; R219Q/S262N/K26A; R219Q/S262N/K26D; R219Q/S262N/K26E; R219Q/S262N/R217A; R219Q/S262N/R217D; R219Q/S262N/R217E; R219Q/S262N/K258A; R219Q/S262N/K258D; R219Q/S262N/K258E; R219Q/S262N/R277A; R219Q/S262N/R277D; R219Q/S262N/R277E; R219Q/S262N/R283A; R219Q/S262N/R283D; R219Q/S262N/R283E; R219Q/S262N/K309A; R219Q/S262N/K309D; R219Q/S262N/K309E; R219Q/S262N/K317A; R219Q/S262N/K317D; R219Q/S262N/K317E; R219Q/S262N/K321A; R219Q/S262N/K321D; R219Q/S262N/K321E; R219Q/S262N/R352A; R219Q/S262N/R352D; R219Q/S262N/R352E; R219Q/S262N/R441A; R219Q/S262N/R441D; R219Q/S262N/R441E; R219Q/S262N/K444A; R219Q/S262N/K444D; R219Q/S262N/K444E; R219Q/S262N/K461A; R219Q/S262N/K461D; R219Q/S262N/K461E; R219Q/S262N/K469A; R219Q/S262N/K469D; R219Q/S262N/K469E; R219Q/S262N/K470A; R219Q/S262N/K470D; R219Q/S262N/K470E; R219Q/S262N/D86A; R219Q/S262N/D86C; R219Q/S262N/D86E; R219Q/S262N/D86F; R219Q/S262N/D86G; R219Q/S262N/D86H; R219Q/S262N/D86I; R219Q/S262N/D86K; R219Q/S262N/D86L; R219Q/S262N/D86M; R219Q/S262N/D86N; R219Q/S262N/D86P; R219Q/S262N/D86Q; R219Q/S262N/D86R; R219Q/S262N/D86S; R219Q/S262N/D86T; R219Q/S262N/D86V; R219Q/S262N/D86W; R219Q/S262N/D86Y; R219Q/S262N/E179C; R219Q/S262N/E179F; R219Q/S262N/E179H; R219Q/S262N/E179I; R219Q/S262N/E179K; R219Q/S262N/E179L; R219Q/S262N/E179M; R219Q/S262N/E179N; R219Q/S262N/E179P; R219Q/S262N/E179Q; R219Q/S262N/E179R; R219Q/S262N/E179W; R219Q/S262N/E179Y; R219C/S262N; R219D/S262N; R219E/S262N; R219F/S262N; R219G/S262N; R219H/S262N; R219I/S262N; R219L/S262N; R219M/S262N; R219P/S262N; R219S/S262N; R219T/S262N; R219V/S262N; R219W/S262N; R219Y/S262N; R219Q/S262N/L221C; R219Q/S262N/L221D; R219Q/S262N/L221E; R219Q/S262N/L221F; R219Q/S262N/L221H; R219Q/S262N/L221I; R219Q/S262N/L221K; R219Q/S262N/L221M; R219Q/S262N/L221N; R219Q/S262N/L221P; R219Q/S262N/L221Q; R219Q/S262N/L221R; R219Q/S262N/L221S; R219Q/S262N/L221T; R219Q/S262N/L221W; R219Q/S262N/L221Y; R219Q/S262C; R219Q/S262D; R219Q/S262E; R219Q/S262F; R219Q/S262G; R219Q/S262H; R219Q/S262I; R219Q/S262K; R219Q/S262L; R219Q/S262P; R219Q/S262Q; R219Q/S262R; R219Q/S262T; R219Q/S262W; R219Q/S262Y; R219Q/S262N/H264C; R219Q/S262N/H264D; R219Q/S262N/H264E; R219Q/S262N/H264F; R219Q/S262N/H264I; R219Q/S262N/H264K; R219Q/S262N/H264L; R219Q/S262N/H264M; R219Q/S262N/H264P; R219Q/S262N/H264R; R219Q/S262N/H264S; R219Q/S262N/H264T; R219Q/S262N/H264V; R219Q/S262N/H264W; R219Q/S262N/H264Y; R219Q/S262N/S266A; R219Q/S262N/S266C; R219Q/S262N/S266D; R219Q/S262N/S266E; R219Q/S262N/S266F; R219Q/S262N/S266G; R219Q/S262N/S266H; R219Q/S262N/S266I; R219Q/S262N/S266K; R219Q/S262N/S266L; R219Q/S262N/S266M; R219Q/S262N/S266N; R219Q/S262N/S266P; R219Q/S262N/S266Q; R219Q/S262N/S266R; R219Q/S262N/S266T; R219Q/S262N/S266V; R219Q/S262N/S266W; R219Q/S262N/S266Y; R219Q/S262N/K267A; R219Q/S262N/K267C; R219Q/S262N/K267D; R219Q/S262N/K267E; R219Q/S262N/K267F; R219Q/S262N/K267G; R219Q/S262N/K267H; R219Q/S262N/K267I; R219Q/S262N/K267L; R219Q/S262N/K267M; R219Q/S262N/K267N; R219Q/S262N/K267P; R219Q/S262N/K267Q; R219Q/S262N/K267R; R219Q/S262N/K267S; R219Q/S262N/K267T; R219Q/S262N/K267V; R219Q/S262N/K267W; R219Q/S262N/K267Y; R219Q/S262N/V296A; R219Q/S262N/V296C; R219Q/S262N/V296D; R219Q/S262N/V296E; R219Q/S262N/V296F; R219Q/S262N/V296G; R219Q/S262N/V296H; R219Q/S262N/V296I; R219Q/S262N/V296K; R219Q/S262N/V296L; R219Q/S262N/V296M; R219Q/S262N/V296N; R219Q/S262N/V296P; R219Q/S262N/V296Q; R219Q/S262N/V296R; R219Q/S262N/V296S; R219Q/S262N/V296T; R219Q/S262N/V296W; R219Q/S262N/V296Y; R219Q/K11A/R20A; R219Q/K11A/R20A/K371A; R219Q/R20A/K371A; R219Q/K11A/K371A; S262N/K11A/R20A; S262N/K11A/R20A/K371A; S262N/R20A/K371A; and S262N/K11A/K371A.

[0131] Examples of these Combination Mutants Containing these Replacements:

[0132] K11A/R20A (SEQ ID NO:55); K11A/R20A/K371A (SEQ ID NO:56); R20A/K371A (SEQ ID NO:57); K11A/K371A (SEQ ID NO:58); S262N/K371D (SEQ ID NO:59); S262N/K371E (SEQ ID NO:60); S262N/R20E (SEQ ID NO:61); S262N/R20E/K371D (SEQ ID NO:62); S262N/R20E/K371E (SEQ ID NO:63); R219Q/K371E (SEQ ID NO:263); R219Q/K371D (SEQ ID NO:264); R219Q/R20E (SEQ ID NO:265); R219Q/K371E/R20E (SEQ ID NO:266); R219Q/K371D/R20E (SEQ ID NO:267); R219Q/S262N/K371E (SEQ ID NO:268); R219Q/S262N/K371D (SEQ ID NO:269); R219Q/S262N/R20E (SEQ ID NO:270); R219Q/S262N/K371E/R20E (SEQ ID NO:271); R219Q/S262N/K371D/R20E (SEQ ID NO:272); R219Q/S262N (SEQ ID NO:273); R219Q/S262N/K11A (SEQ ID NO:659); R219Q/S262N/K11D (SEQ ID NO:660); R219Q/S262N/K11E (SEQ ID NO:661); R219Q/S262N/K13A (SEQ ID NO:662); R219Q/S262N/K13D (SEQ ID NO:663); R219Q/S262N/K13E (SEQ ID NO:682); R219Q/S262N/K371A (SEQ ID NO:683); R219Q/S262N/K372A (SEQ ID NO:684); R219Q/S262N/K372D (SEQ ID NO:685); R219Q/S262N/K372E (SEQ ID NO:686); R219Q/S262N/K452A (SEQ ID NO: 687); R219Q/S262N/K452D (SEQ ID NO:688); R219Q/S262N/K452E (SEQ ID NO:689); R219Q/S262N/R20A (SEQ ID NO:690); R219Q/S262N/R20D (SEQ ID NO:691); R219Q/S262N/R366A (SEQ ID NO:692); R219Q/S262N/R366D (SEQ ID NO: 693); R219Q/S262N/R366E (SEQ ID NO:694); R219Q/S262N/H264A (SEQ ID NO: 695); R219Q/S262N/H264Q (SEQ ID NO:696); R219Q/S262N/H264N (SEQ ID NO: 697); R219Q/S262N/H264G (SEQ ID NO:698); R219K/S262N (SEQ ID NO:699); R219N/S262N (SEQ ID NO:700); R219A/S262N (SEQ ID NO:701); R219Q/S262N/L221A (SEQ ID NO:702); R219Q/S262N/L221V (SEQ ID NO:703); R219Q/S262N/L221G (SEQ ID NO:704); R219Q/S262N/E179D (SEQ ID NO: 705); R219Q/S262N/E179A (SEQ ID NO:706); R219Q/S262N/E179S (SEQ ID NO: 707); R219Q/S262N/E179T (SEQ ID NO:708); R219Q/S262N/E179V (SEQ ID NO:709); R219Q/S262N/E179G (SEQ ID NO:710); R219Q/S262A (SEQ ID NO:711); R219Q/S262V (SEQ ID NO:712); R219Q/S262M (SEQ ID NO:713); R219Q/S262N/K11A/R20A (SEQ ID NO:714); R219Q/S262N/K11A/R20A/K371A (SEQ ID NO:715); R219Q/S262N/R20A/K371A (SEQ ID NO:716); R219Q/S262N/K11A/K371A (SEQ ID NO:717); R219Q/S262N/K26A (SEQ ID NO:718); R219Q/S262N/K26D (SEQ ID NO:719); R219Q/S262N/K26E (SEQ ID NO:720); R219Q/S262N/R217A (SEQ ID NO:721); R219Q/S262N/R217D (SEQ ID NO: 722); R219Q/S262N/R217E (SEQ ID NO:723); R219Q/S262N/K258A (SEQ ID NO: 724); R219Q/S262N/K258D (SEQ ID NO:725); R219Q/S262N/K258E (SEQ ID NO: 726); R219Q/S262N/R277A (SEQ ID NO:727); R219Q/S262N/R277D (SEQ ID NO: 728); R219Q/S262N/R277E (SEQ ID NO:729); R219Q/S262N/R283A (SEQ ID NO: 730); R219Q/S262N/R283D (SEQ ID NO:731); R219Q/S262N/R283E (SEQ ID NO: 732); R219Q/S262N/K309A (SEQ ID NO:733); R219Q/S262N/K309D (SEQ ID NO: 734); R219Q/S262N/K309E (SEQ ID NO:735); R219Q/S262N/K317A (SEQ ID NO:736); R219Q/S262N/K317D (SEQ ID NO:737); R219Q/S262N/K317E (SEQ ID NO: 738); R219Q/S262N/K321A (SEQ ID NO:739); R219Q/S262N/K321D (SEQ ID NO: 740); R219Q/S262N/K321E (SEQ ID NO:741); R219Q/S262N/R352A (SEQ ID NO: 742); R219Q/S262N/R352D (SEQ ID NO:743); R219Q/S262N/R352E (SEQ ID NO: 744); R219Q/S262N/R441A (SEQ ID NO:745); R219Q/S262N/R441D (SEQ ID NO: 746); R219Q/S262N/R441E (SEQ ID NO:747); R219Q/S262N/K444A (SEQ ID NO: 748); R219Q/S262N/K444D (SEQ ID NO:749); R219Q/S262N/K444E (SEQ ID NO:750); R219Q/S262N/K461A (SEQ ID NO:751); R219Q/S262N/K461D (SEQ ID NO: 752); R219Q/S262N/K461E (SEQ ID NO:753); R219Q/S262N/K469A (SEQ ID NO: 754); R219Q/S262N/K469D (SEQ ID NO:755); R219Q/S262N/K469E (SEQ ID NO:756); R219Q/S262N/K470A (SEQ ID NO:757); R219Q/S262N/K470D (SEQ ID NO: 758); R219Q/S262N/K470E (SEQ ID NO:759); R219Q/S262N/D86A (SEQ ID NO: 760); R219Q/S262N/D86C (SEQ ID NO:761); R219Q/S262N/D86E (SEQ ID NO:762); R219Q/S262N/D86F (SEQ ID NO:763); R219Q/S262N/D86G (SEQ ID NO:764); R219Q/S262N/D86H (SEQ ID NO:765); R219Q/S262N/D86I (SEQ ID NO:766); R219Q/S262N/D86K (SEQ ID NO:767); R219Q/S262N/D86L (SEQ ID NO:768); R219Q/S262N/D86M (SEQ ID NO:769); R219Q/S262N/D86N (SEQ ID NO:770); R219Q/S262N/D86P (SEQ ID NO:771); R219Q/S262N/D86Q (SEQ ID NO:772); R219Q/S262N/D86R (SEQ ID NO:773); R219Q/S262N/D86S (SEQ ID NO:774); R219Q/S262N/D86T (SEQ ID NO:775); R219Q/S262N/D86V (SEQ ID NO:776); R219Q/S262N/D86W (SEQ ID NO:777); R219Q/S262N/D86Y (SEQ ID NO:778); R219Q/S262N/E179C (SEQ ID NO:779); R219Q/S262N/E179F (SEQ ID NO: 780); R219Q/S262N/E179H (SEQ ID NO:781); R219Q/S262N/E179I (SEQ ID NO: 782); R219Q/S262N/E179K (SEQ ID NO:783); R219Q/S262N/E179L (SEQ ID NO:784); R219Q/S262N/E179M (SEQ ID NO:785); R219Q/S262N/E179N (SEQ ID NO: 786); R219Q/S262N/E179P (SEQ ID NO:787); R219Q/S262N/E179Q (SEQ ID NO: 788); R219Q/S262N/E179R (SEQ ID NO:789); R219Q/S262N/E179W (SEQ ID NO: 790); R219Q/S262N/E179Y (SEQ ID NO:791); R219C/S262N (SEQ ID NO:792); R219D/S262N (SEQ ID NO:793); R219E/S262N (SEQ ID NO:794); R219F/S262N (SEQ ID NO:795); R219G/S262N (SEQ ID NO:796); R219H/S262N (SEQ ID NO:797); R219I/S262N (SEQ ID NO:798); R219L/S262N (SEQ ID NO:799); R219M/S262N (SEQ ID NO:800); R219P/S262N (SEQ ID NO:801); R219S/S262N (SEQ ID NO:802); R219T/S262N (SEQ ID NO:803); R219V/S262N (SEQ ID NO:804); R219W/S262N (SEQ ID NO:805); R219Y/S262N (SEQ ID NO:806); R219Q/S262N/L221C (SEQ ID NO:807); R219Q/S262N/L221D (SEQ ID NO:808); R219Q/S262N/L221E (SEQ ID NO:809); R219Q/S262N/L221F (SEQ ID NO:810); R219Q/S262N/L221H (SEQ ID NO:811); R219Q/S262N/L221I (SEQ ID NO:812); R219Q/S262N/L221K (SEQ ID NO: 813); R219Q/S262N/L221M (SEQ ID NO:814); R219Q/S262N/L221N (SEQ ID NO: 815); R219Q/S262N/L221P (SEQ ID NO:816); R219Q/S262N/L221Q (SEQ ID NO: 817); R219Q/S262N/L221R (SEQ ID NO:818); R219Q/S262N/L221S (SEQ ID NO: 819); R219Q/S262N/L221T (SEQ ID NO:820); R219Q/S262N/L221W (SEQ ID NO:821); R219Q/S262N/L221Y (SEQ ID NO:822); R219Q/S262C (SEQ ID NO:823); R219Q/S262D (SEQ ID NO:824); R219Q/S262E (SEQ ID NO:825); R219Q/S262F (SEQ ID NO:826); R219Q/S262G (SEQ ID NO:827); R219Q/S262H (SEQ ID NO:828); R219Q/S262I (SEQ ID NO:829); R219Q/S262K (SEQ ID NO:830); R219Q/S262L (SEQ ID NO:831); R219Q/S262P (SEQ ID NO:832); R219Q/S262Q (SEQ ID NO:833); R219Q/S262R (SEQ ID NO:834); R219Q/S262T (SEQ ID NO:835); R219Q/S262W (SEQ ID NO:836); R219Q/S262Y (SEQ ID NO:837); R219Q/S262N/H264C (SEQ ID NO:838); R219Q/S262N/H264D (SEQ ID NO:839); R219Q/S262N/H264E (SEQ ID NO:840); R219Q/S262N/H264F (SEQ ID NO:841); R219Q/S262N/H264I (SEQ ID NO: 842); R219Q/S262N/H264K (SEQ ID NO:843); R219Q/S262N/H264L (SEQ ID NO: 844); R219Q/S262N/H264M (SEQ ID NO:845); R219Q/S262N/H264P (SEQ ID NO: 846); R219Q/S262N/H264R (SEQ ID NO:847); R219Q/S262N/H264S (SEQ ID NO: 848); R219Q/S262N/H264T (SEQ ID NO:849); R219Q/S262N/H264V (SEQ ID NO: 850); R219Q/S262N/H264W (SEQ ID NO:851); R219Q/S262N/H264Y (SEQ ID NO: 852); R219Q/S262N/S266A (SEQ ID NO:853); R219Q/S262N/S266C (SEQ ID NO:854); R219Q/S262N/S266D (SEQ ID NO:855); R219Q/S262N/S266E (SEQ ID NO:856); R219Q/S262N/S266F (SEQ ID NO:857); R219Q/S262N/S266G (SEQ ID NO: 858); R219Q/S262N/S266H (SEQ ID NO:859); R219Q/S262N/S266I (SEQ ID NO: 860); R219Q/S262N/S266K (SEQ ID NO:861); R219Q/S262N/S266L (SEQ ID NO:862); R219Q/S262N/S266M (SEQ ID NO:863); R219Q/S262N/S266N (SEQ ID NO: 864); R219Q/S262N/S266P (SEQ ID NO:865); R219Q/S262N/S266Q (SEQ ID NO:866); R219Q/S262N/S266R (SEQ ID NO:867); R219Q/S262N/S266T (SEQ ID NO: 868); R219Q/S262N/S266V (SEQ ID NO:869); R219Q/S262N/S266W (SEQ ID NO: 870); R219Q/S262N/S266Y (SEQ ID NO:871); R219Q/S262N/K267A (SEQ ID NO: 872); R219Q/S262N/K267C (SEQ ID NO:873); R219Q/S262N/K267D (SEQ ID NO: 874); R219Q/S262N/K267E (SEQ ID NO:875); R219Q/S262N/K267F (SEQ ID NO: 876); R219Q/S262N/K267G (SEQ ID NO:877); R219Q/S262N/K267H (SEQ ID NO: 878); R219Q/S262N/K267I (SEQ ID NO:879); R219Q/S262N/K267L (SEQ ID NO:880); R219Q/S262N/K267M (SEQ ID NO:881); R219Q/S262N/K267N (SEQ ID NO:882); R219Q/S262N/K267P (SEQ ID NO:883); R219Q/S262N/K267Q (SEQ ID NO:884); R219Q/S262N/K267R (SEQ ID NO:885); R219Q/S262N/K267S (SEQ ID NO: 886); R219Q/S262N/K267T (SEQ ID NO:887); R219Q/S262N/K267V (SEQ ID NO:888); R219Q/S262N/K267W (SEQ ID NO:889); R219Q/S262N/K267Y (SEQ ID NO:890); R219Q/S262N/V296A (SEQ ID NO:891); R219Q/S262N/V296C (SEQ ID NO: 892); R219Q/S262N/V296D (SEQ ID NO:893); R219Q/S262N/V296E (SEQ ID NO: 894); R219Q/S262N/V296F (SEQ ID NO:895); R219Q/S262N/V296G (SEQ ID NO:896); R219Q/S262N/V296H (SEQ ID NO:897); R219Q/S262N/V296I (SEQ ID NO:898); R219Q/S262N/V296K (SEQ ID NO:899); R219Q/S262N/V296L (SEQ ID NO: 900); R219Q/S262N/V296M (SEQ ID NO:901); R219Q/S262N/V296N (SEQ ID NO:902); R219Q/S262N/V296P (SEQ ID NO:903); R219Q/S262N/V296Q (SEQ ID NO: 904); R219Q/S262N/V296R (SEQ ID NO:905); R219Q/S262N/V296S (SEQ ID NO: 906); R219Q/S262N/V296T (SEQ ID NO:907); R219Q/S262N/V296W (SEQ ID NO: 908); R219Q/S262N/V296Y (SEQ ID NO:909); R219Q/K11A/R20A (SEQ ID NO:910); R219Q/K11A/R20A/K371A (SEQ ID NO:911); R219Q/R20A/K371A (SEQ ID NO: 912); R219Q/K11A/K371A (SEQ ID NO:913); S262N/K11A/R20A (SEQ ID NO: 914); S262N/K11A/R20A/K371A (SEQ ID NO:915); S262N/R20A/K371A (SEQ ID NO: 916); and S262N/K11A/K371A (SEQ ID NO:917).

### BRIEF DESCRIPTION OF THE FIGURES

[0133] FIGS. 1A-IF depict exemplary alignments of precursor human adenosine deaminase 2 (ADA2) set forth in SEQ ID NO:2 (residues 30-511 corresponding to mature ADA2 set forth in SEQ ID NO:5) with other ADA2 proteins. A “*” means that the aligned residues are identical, a “:” means that aligned residues are not identical, but are similar and contain conservative amino acids residues at the aligned position, and a “.” means that the aligned residues are similar and contain semi-conservative amino acid residues at the aligned position. Residues corresponding to the putative receptor binding domain (PRB) are underlined. Exemplary, non-limiting, corresponding positions for amino acid replacements are indicated by highlighting. For example, FIG. 1A depicts the alignment of ADA2 set forth in SEQ ID NO:2 with chimpanzee ADA2 set forth in SEQ ID NO:286. FIG. 1B depicts the alignment of a ADA2 set forth in SEQ ID NO:2 with gorilla ADA2 set forth in SEQ ID NO:287. FIG. 1C depicts the alignment of a ADA2 set forth in SEQ ID NO:2 with pygmy chimpanzee set forth in SEQ ID NO:288. FIG. 1D depicts the alignment of ADA2 set forth in SEQ ID NO:2 with Sumatran orangutan ADA2 set forth in SEQ ID NO:289. FIG. 1E depicts the alignment of ADA2 set forth in SEQ ID NO:2 with northern white-cheeked gibbon ADA2 set forth in SEQ ID NO:290. FIG. 1F depicts the alignment of ADA2 set forth in SEQ ID NO:2 with crab-eating macaque ADA2 set forth in SEQ ID NO:291.

[0134] FIG. 2 depicts the biosynthesis and catabolism of extracellular adenosine, and adenosine receptor signaling (adapted from Antonioli et al. (2013) Nat Rev Can 13:842-857). Physiological conditions such as hypoxia, ischemia, inflammation, tumor environment or trauma can promote the extracellular accumulation of ATP, which is metabolized to AMP by the cell surface enzyme CD39. AMP is in turn metabolized to adenosine by CD73. Extracellular adenosine can bind to four different G-protein-coupled adenosine receptors (ADRs; i.e. A1, A2A, A2B and A3), expressed on the cell surface of nearby immune, tumor or other cells, to mediate various downstream adenosine-mediated signaling and activities, such as immunosuppression, cancer cell proliferation, cancer cell migration and/or metastasis, angiogenesis, and other effects. Nucleoside transporters (NTs) facilitate uptake of extracellular adenosine into cells. Adenosine deaminase 2 (ADA2), including exogenous ADA2 or variants as provided herein, can breakdown extracellular adenosine by catalyzing the conversion of adenosine to inosine.

### DETAILED DESCRIPTION

### Outline

[0135] A. Definitions
[0136] B. Adenosine Deaminase 2 (ADA2) and Modulation of Adenosine-Mediated Tumor Immunosuppression
   [0137] 1. Tumor Immunity and Immune Evasion
   [0138] 2. Adenosine Immunomodulation in Cancer and Tumor Microenvironment (TME)
   [0139] 3. Adenosine Deaminase and Targeting Adenosine in Treatment of Cancer
[0140] C. Adenosine Deaminase 2 (ADA2) and Variants Thereof
   [0141] 1. Structure and Activity of ADA2
      [0142] a. Structure of ADA2
      [0143] b. Activities of ADA2
   [0144] 2. ADA2 Variants
      [0145] a. Exemplary Modifications
         [0146] i. Amino Acid Replacements
         [0147] ii. Modification(s) of PRB Domain
         [0148] iii. Amino Acid Replacement(s) with Altered Interaction between the PRB Domain and Other regions of ADA2
         [0149] iv. Hyperglycosylation
      [0150] b. Nucleic Acid Molecules
      [0151] c. Production of Variant ADA2 Proteins
[0152] D. ADA2 Conjugates and Fusion Proteins
   [0153] 1. Half-Life Extending Moieties
      [0154] a. Low Complexity Polypeptides
      [0155] b. C-terminal peptide (CTP) of the R Subunit of Human Chorionic Gonadotropin
      [0156] c. Immunoglobulin Constant Region (Fc) or Portions Thereof
      [0157] d. Albumin or Fragment, or Variant Thereof
      [0158] e. Albumin Binding Moiety
      [0159] f. PAS Sequences
      [0160] g. HAP Sequences
      [0161] h. XTEN Sequences
      [0162] i. Transferrin or Fragment thereof
      [0163] j. Polymer conjugation
         [0164] i. Polyethylene Glycol (PEG)
         [0165] ii. Hydroxyethyl Starch (HES)
         [0166] iii. Polysialic Acids (PSA)
         [0167] iv. Other polymers
   [0168] 2. Methods of Producing Conjugates or Fusion Proteins Linkers
      [0169] i. Peptide Linkers
      [0170] ii. Heterobifunctional linking agents
[0171] E. Methods of Producing Nucleic Acids Encoding ADA2 and Polypeptides Thereof
   [0172] 1. Isolation or Preparation of Nucleic Acids Encoding ADA2 Polypeptides
   [0173] 2. Generation of Mutant or Modified Nucleic Acid and Encoding Polypeptides
   [0174] 3. Vectors and Cells
   [0175] Immune cells that encode and express the ADA2 variants provided herein
   [0176] 4. Expression
      [0177] a. Prokaryotic Cells
      [0178] b. Yeast Cells
      [0179] c. Insect Cells
      [0180] d. Mammalian Cells
      [0181] e. Plants
   [0182] 5. Purification Techniques
[0183] F. Methods of Assessing Activity and Physical Properties of ADA2
   [0184] 1. Adenosine Deaminase Assay
   [0185] 2. Methods of Assessing Heparin Binding
      [0186] a. Affinity Assay
      [0187] b. ELISA Assay
      [0188] c. Dot Blot and other Radiolabeled Heparin Binding Assays
   [0189] 3. Methods for Assessing Stability
      [0190] a. Conditions
         [0191] i. Stability in Plasma
         [0192] ii. Thermal Stability
         [0193] iii. Stability in pH or pH Optima
         [0194] iv. Other Conditions
      [0195] b. Determination of Physical Properties
         [0196] i. Enzymatic Activity
         [0197] ii. Chromatographic Analysis of Protein Purity
         [0198] iii. Differential Scanning Calorimetry
         [0199] iv. Differential Scanning Fluorimetry
         [0200] v. Intrinsic Fluorescence Spectroscopy
         [0201] vi. Circular Dichroism
         [0202] vii. Dynamic Light Scattering
         [0203] viii. Static Light Scattering
         [0204] ix. Turbidity Measurements
         [0205] x. Other Methods to Determine Stability
   [0206] 4. Assay for Therapeutic Activity
      [0207] a. In vitro Tests
      [0208] b. In vivo Animal Models
         [0209] i. Tumor Metabolic Activity
         [0210] ii. Tumor Size and Volume
      [0211] c. Clinical Monitoring
   [0212] 5. Pharmacodynamics/Pharmacokinetics and Tolerability
[0213] G. Pharmaceutical Compositions and Formulations
   [0214] 1. Formulations—liquids, injectables, emulsions Lyophilized Powders
   [0215] 2. Compositions for Other Routes of Administration
   [0216] 3. Dosages and Administration
   [0217] 4. Packaging and Articles of Manufacture
[0218] H. Methods of Treatment with an Adenosine Deaminase 2 (ADA2)
   [0219] 1. Exemplary Diseases and Conditions
      [0220] a. Cancers and Tumors
      [0221] b. Non-Cancer Hyperproliferative Diseases
      [0222] c. Fibrotic Diseases
      [0223] d. Infectious Diseases
      [0224] e. Other Diseases and Conditions
   [0225] 2. Methods of Patient Selection
      [0226] a. Adenosine-associated Biomarkers
         [0227] i. Plasma Adenosine Levels
         [0228] ii. Adenosine Receptors (ADRs)
         [0229] iii. Ectonucleotidases CD39 and CD73
      [0230] b. Patient Selection
   [0231] 3. Dosages and Administration
   [0232] 4. Combination Therapies
      [0233] a. Anticancer Agents
         [0234] i. Anticancer Antibodies
         [0235] ii. Chemotherapeutic Agents
         [0236] iii. Radiation Therapy
         [0237] iv. Anti-angiogenic Agents
         [0238] v. Immune Checkpoint Inhibitors
         (a) Anti-CTLA-4 Therapies
         (b) Anti-PD-1 and Anti-PD-L1 Therapies
         [0239] b. Other Immunomodulatory Agents
         [0240] c. Hyaluronan-Degrading Enzyme
         [0241] Soluble hyaluronan degrading enzymes (e.g. soluble PH20)
         [0242] d. Antibodies to Treat Infectious Diseases
         [0243] e. Antibiotics and Antifungals
[0244] I. Examples

### A. DEFINITIONS

[0245] Unless defined otherwise, all technical and scientific terms used herein have the same meaning as is commonly understood by one of skill in the art to which the invention(s) belong. All patents, patent applications, published applications and publications, Genbank sequences, databases, websites and other published materials referred to throughout the entire disclosure herein, unless noted otherwise, are incorporated by reference in their entirety. In the event that there are a plurality of definitions for terms herein, those in this section prevail. Where reference is made to a URL or other such identifier or address, it understood that such identifiers can change and particular information on the internet can come and go, but equivalent information can be found by searching the internet. Reference thereto evidences the availability and public dissemination of such information.

[0246] As used herein, “adenosine” refers to a purine nucleoside that is composed of a molecule of adenine attached to a ribose sugar molecule (ribofuranose) moiety via a β-N₉-glycosidic bond. Adenosine can modulate a variety of physiological processes through its interaction with adenosine receptors.

[0247] As used herein, “Michaelis constant” or Kₘ is a measure of the substrate concentration required for effective catalysis to occur. For example, an enzyme with a high Kₘ can require a higher substrate concentration to achieve a given reaction velocity than an enzyme with a lower Kₘ for the substrate. Kₘ can represent the affinity of the enzyme for a substrate.

[0248] As used herein, “catalytic efficiency” is the efficiency with which an enzyme reacts with a substrate to form a product. It is represented by the k_{cat}/Kₘ (M⁻¹s⁻¹1 or 1/Ms). Methods to assess kinetic parameters of catalytic activity, including k_{cat}, Kₘ, are well known to a skilled artisan. Generally, k_{cat}/Kₘ is measured under steady state conditions.

[0249] As used herein, “adenosine deaminase” or “ADA” refers to an enzyme that catalyzes the hydrolytic deamination of adenosine to form inosine. An ADA also can deaminate 2′deoxyadenosine to 2′deoxyinosine, and hence includes enzymes that have 2′deoxyadenosine deaminase activity. In humans there are two ADA isozymes, designated ADA1 and ADA2, that differ in their molecular weight, catalytic parameters and other properties.

[0250] As used herein, “adenosine deaminase 1” or ADA1 refers to an ADA that lacks a signal peptide and is ubiquitously expressed inside cells. It is produced as a monomer. Exemplary of ADA1 is human ADA1 having the sequence of nucleotides set forth in SEQ ID NO: 11 and encoding the sequence of amino acids set forth in SEQ ID NO: 12. In humans, wild-type ADA1 is characterized by a Km of or of about 5.2×10⁻⁵ M, has a pH optimum of from or from about 7 to 7.5, and exhibits a similar affinity for both adenosine and 2′deoxyadenosine. For example, ADA1 has a 2′deoxyadenosine/adenosine deaminase ratio of at least or at least about 0.70, such at least or at least about 0.75. Reference to ADA1 includes wild-type or native ADA1 present in mammalian, including human and non-human, subjects. For example, reference to ADA1 includes human ADA1 that contains a polypeptide having the sequence of amino acids set forth in SEQ ID NO: 12. Reference to ADA1 also includes variants thereof, such as allelic variants, species variants, splice variants and other variants that include a polypeptide having a sequence of amino acids that has at least 65%, 70%, 75%, 80%, 85%, 85%, 87%, 88%, 89%, 90%, 91%, 92%, 93%, 94%, 95%, 96%, 97%, 98%, 99% or more sequence identity to SEQ ID NO: 12, and that exhibit adenosine deaminase activity.

[0251] As used herein, “adenosine deaminase 2,” or “ADA2” refers to an ADA that is present in extracellular environments, including in the plasma. ADA2 is produced from a precursor polypeptide that contains a signal peptide (e.g. ADA2 set forth in SEQ ID NO:2), which is removed to yield a mature protein lacking the signal peptide (e.g. ADA2 set forth in SEQ ID NO:5). The secreted ADA2 is a homodimer containing two identical polypeptide chains that interact via non-polar interactions between residues of each subunit. In humans, wild-type ADA2 is characterized with a Km that is or is about 200×10⁻⁵ M, has a pH optimum of or of about 6.5±0.2, and exhibits a weak affinity for 2′deoxyadenosine. For example, ADA2 has a 2′deoxyadenosine/adenosine deaminase ratio of less than 0.40, such less than or about 0.30 or less than or about 0.25. Reference to ADA2 includes wild-type or native ADA2 present in mammalian, including human and non-human, subjects. For example, reference to ADA2 includes human ADA2 that contains a polypeptide having the sequence of amino acids set forth in SEQ ID NO:2, the mature form set forth in SEQ ID NO:5, catalytically active portions of SEQ ID NO:5, and dimer forms thereof. Reference to ADA2 also includes precursor, mature, catalytically active forms, and dimer forms that are variants thereof, such as allelic variants, species variants, splice variants and other variants that include a polypeptide having a sequence of amino acids that has at least 40%, 50%, 60%, 65%, 70%, 75%, 80%, 85%, 85%, 87%, 88%, 89%, 90%, 91%, 92%, 93%, 94%, 95%, 96%, 97%, 98%, 99% or more sequence identity to the precursor polypeptide set forth in SEQ ID NO:2 or the mature form thereof set forth in SEQ ID NO:5, and that, when in active form, exhibit adenosine deaminase activity. Such variants, when in active form, exhibit at least 40%, 50%, 70%, 90%, 90%, 100%, 110%, 120%, 130%, 140%, 150%, 160%, 170%, 180%, 190%, 200% 300%, 400%, 500%, 600%, 700%, 800%, 900%, 1000% or more activity than the activity of a native or wildtype ADA2 polypeptide. As used herein, wild-type” or “native” with reference to ADA2 refers to a ADA2 protein containing a polypeptide encoded by a native or naturally occurring ADA2 gene, including allelic variants, that is present in an organism, including a human and other animals, in nature. Reference to wild-type ADA2 without reference to a species is intended to encompass any species of a wild-type ADA2. Included among wild-type ADA2 polypeptides are the encoded precursor polypeptide, fragments thereof, and processed forms thereof, such as a mature form lacking the signal peptide, as well as any pre- or post-translationally processed or modified forms thereof. Also included among native ADA2 proteins are those that are post-translationally modified, including, but not limited to, modification by glycosylation, carboxylation and hydroxylation. Native ADA2 proteins also include the polypeptide monomer as well as dimer forms. For example, humans express native ADA2. Wild-type human ADA2 is set forth in SEQ ID NO:2 (precursor) and SEQ ID NO:5 (mature), and includes catalytically active forms thereof as described herein, and allelic variants (precursor or mature) set forth in any of SEQ ID NOS:376-383, or isoforms of an ADA2 such as ADA2 set forth in SEQ ID NO:68. Wildtype or native ADA2 from non-human species include, but are not limited to, ADA2 from Pan troglodytes (chimpanzee; precursor form SEQ ID NO:286, mature form SEQ ID NO:326; NCBI Acc. No. XP_003317127.1); Gorilla gorilla (gorilla; precursor form SEQ ID NO:287, mature form SEQ ID NO:327; NCBI Acc. No. XP_004063024.1); Pan paniscus (pygmy chimpanzee; precursor form SEQ ID NO:288, mature form SEQ ID NO:328; NCBI Acc. No. XP_003828345.1); Pongo abelii (Sumatran orangutan; precursor form SEQ ID NO:289, mature form SEQ ID NO:329; NCBI Acc. No. NP_001125360.1); Nomascus leucogenys (Northern white-cheeked gibbon; precursor form SEQ ID NO:290, mature form SEQ ID NO:330; NCBI Acc. No. XP_004088517.1); Macaca fascicularis (crab-eating macaque; precursor form SEQ ID NO:291, mature form SEQ ID NO:331; NCBI Acc. No. XP_005568111.1); Chlorocebus sabaeus (green monkey; precursor form SEQ ID NO:292, mature form SEQ ID NO:332; NCBI Acc. No. XP_007972990.1); Macaca mulatta (Rhesus macaque; precursor form SEQ ID NOS:293, 337, mature form SEQ ID NOS:333, 340; GenBank Acc. Nos. AFH32795.1, EHH20002.1); Callithrix jacchus (marmoset; precursor form SEQ ID NOS:294, 374, mature form SEQ ID NO:334, 375; NCBI Acc. No. XP_009004591.1, XP_009004586.1); Xenopus laevis (African clawed frog; precursor form SEQ ID NO:295, mature form SEQ ID NO:335; NCBI Acc. No. NP_001090531.1); Drosophila melanogaster (fruit fly; precursor form SEQ ID NOS:296-300, mature form SEQ ID NOS:336, 338, 339; AAL40913.1, AAL40920.1, AAL40911.1, AAL40912.1, and AAL40910.1); Bombyx mori (silk moth; precursor form SEQ ID NO:301, mature form SEQ ID NO:341; NCBI Acc. No. NP_001098698.1); and Sarcophaga perigrina (flesh fly; precursor form SEQ ID NO:302, mature form SEQ ID NO:342; GenBank Acc. No. BAA11812.1).

[0252] As used herein, a precursor ADA2 refers to a non-secreted form of an ADA2 that contains an N-terminal signal peptide that targets the protein for secretion. The signal peptide is cleaved off in the endoplasmic reticulum. Exemplary of an ADA2 precursor polypeptide is the polypeptide set forth in SEQ ID NO:2, or an allelic or species variant or other variant thereof such as those set forth in any of SEQ ID NOS:286-302, 337 or 376-379.

[0253] As used herein, a “mature ADA2” refers to an ADA2 that lacks a signal sequence. An exemplary mature ADA2 is set forth in SEQ ID NO:5, and also includes variants thereof such as species and allelic variants and other variants, such as those set forth in any of SEQ ID NOS:326-336, 338-342, 375, and 380-383. Reference to mature ADA2 includes dimer forms thereof.

[0254] As used herein, species variants refer to variants in polypeptides among different species, including different mammalian species, such as mouse and human.

[0255] As used herein, allelic variants refer to variations in proteins among members of the same species.

[0256] As used herein, domain (typically a sequence of three or more, generally 5 or 7 or more amino acids) refers to a portion of a molecule, such as proteins or the encoding nucleic acids, that is structurally and/or functionally distinct from other portions of the molecule and is identifiable. For example, domains include those portions of a polypeptide chain that can form an independently folded structure within a protein made up of one or more structural motifs and/or that is recognized by virtue of a functional activity, such as proteolytic activity.

[0257] A protein can have one, or more than one, distinct domains. For example, a domain can be identified, defined or distinguished by homology of the sequence therein to related family members, such as homology to motifs that define a protease domain. In another example, a domain can be distinguished by its function, such as by proteolytic activity, or an ability to interact with a biomolecule, such as DNA binding, ligand binding, and dimerization. A domain independently can exhibit a biological function or activity such that the domain independently or fused to another molecule can perform an activity, such as, for example proteolytic activity or ligand binding. A domain can be a linear sequence of amino acids or a non-linear sequence of amino acids. Many polypeptides contain a plurality of domains. Such domains are known, and can be identified by those of skill in the art. For exemplification herein, definitions are provided, but it is understood that it is well within the skill in the art to recognize particular domains by name. If needed appropriate software can be employed to identify domains.

[0258] As used herein “catalytic domain” or “ADA domain” refers to the domain that confers adenosine deaminase activity. The catalytic domain of an enzyme contains all of the requisite properties of that protein required for its enzymatic, such as adenosine deaminase activity. The ADA domain is structurally composed of an eight-stranded, parallel p-sheet that closes into a barrel and is surrounded by classical a/p-TIM barrel motif helices and five additional, located between β1 and α1 (H1, H2, and H3) and at the C terminus (H4 and H5) (Zavialov et al. (2010) J. Biol. Chem. 285:12367-12377). Loops between β-strands and α-helices contain many of the active site residues required for activity. Active site residues include residues that coordinate zinc binding, active site proton donor and acceptor residues, and substrate binding residues. Exemplary of such residues in human ADA2 are set forth in Table 4. In reference to human ADA2, the ADA domain is contained in the region corresponding to residues 106-502 of the precursor sequence of amino acids set forth in SEQ ID NO:2 (corresponding to residues 77-473 of the mature protein set forth in SEQ ID NO:5), except that residues corresponding to the putative receptor binding (PRB) domain contained therein are not required for catalytic activity.

[0259] As used herein, “a catalytically active portion thereof” or “a catalytically active fragment thereof” refers to an ADA2 polypeptide that contains less than the full-length sequence of a mature ADA2 polypeptide, but contains a contiguous portion of amino acids of an ADA2, including all or part of the catalytic domain, sufficient for adenosine deaminase activity. For example, a catalytically active portion of ADA2 is one that includes a polypeptide containing a contiguous sequence of amino acids of the mature sequence of an ADA2 polypeptide that includes amino acid residues corresponding to residues 83, 85, 327, 330, 355, and 412 with reference to amino acid residues set forth in SEQ ID NO:5, but does not include the full amino acid sequence of the mature ADA2 polypeptide. For example, a catalytically active portion is one that includes a polypeptide containing a contiguous sequence of amino acids of the mature sequence of ADA2 set forth in SEQ ID NO:5 that includes amino acid residues 83, 85, 327, 330, 355, and 412, but that does not include the full length sequence of amino acids set forth in SEQ ID NO:5. An ADA2 that contains a catalytically active portion of an ADA2 polypeptide, when in active form, exhibits at least 1%, 2%, 3%, 4%, 5%, 6%, 7%, 8%, 9%, 10%, 20%, 30%, 40%, 50%, 60%, 70%, 80%, 90%, or more of the activity, such as at least 120%, 130%, 140%, 150%, 200%, 300%, 400%, 500% or more of the activity, compared to the ADA2 containing a full-length mature ADA2 polypeptide. In one example, a catalytically active portion of an ADA2 polypeptide includes a polypeptide that lacks all or a portion of the putative receptor binding (PRB) domain. In another example, a catalytically active portion of an ADA2 polypeptide includes a polypeptide that lacks one or more C-terminal amino acids of the mature polypeptide, i.e. is truncated at the C-terminus, by up to 1, 2, 3, 4, 5, 6, 7, 8, 9, 10, 11, 12, 13, 14, 15, 16, 17, 18, 19, 20, 21, 22, 23, 24, 25, 26, 27, 28, 29, 30, 31, 32, 33, 34, 35, 36, 37, 38, 39, 40, 41, 42, 43, 44, 45, 46, 47, 48, 49, 50, 51, 52, 53, 54, 55, 56, 57, 58, 59, 60, 61, 62, 63, 64, 65, 66, 67, 68, 69, 70, 71, 72, 73, 74, 75, 76, 77, 78, 79, 80, 81, 82, 83, 84, 85, 86, 87, 88, 89, 90, 91, 92, 93, 94, 95, 96, 97, 98, 99, 100 or more contiguous C-terminal amino acid residues compared to the mature ADA2 polypeptide. It is understood that reference herein to a variant ADA2 or catalytically active portion thereof means that the catalytically active portion contains the modification(s) (e.g. amino acid replacement(s)).

[0260] As used herein, “putative receptor binding domain” or “PRB domain” refers to a portion of ADA2 that forms an independently folded structure composed of an α- and p-fold containing a three-stranded antiparallel β-sheets designated SR1-SR2-SR3, surrounded by the HR and partially H2 α-helices on one side and the proline-rich SR2-SR3 loop on the other side (Zavialov et al. (2010) J. Biol. Chem. 285:12367-12377). The PRB domain contains conserved cysteine residues that form a disulfide bond between C137 and C159 of precursor ADA2 set forth in SEQ ID NO:2 (positions C108 and C130 of mature ADA2 set forth in SEQ ID NO:5). The PRB domain is reported to be involved in binding of ADA2 to its receptors. It is understood that the particular residues that make up the domain can vary (e.g. longer or shorter), for example, depending on methods used to identify the domain. In reference to human ADA2, the PRB domain is reported to correspond to residues 127-185 or 134-177 of precursor ADA2 set forth in SEQ ID NO:2 (residues 98-156 or 105-148, respectively, of mature ADA2 set forth in SEQ ID NO:5).

[0261] As used herein, a protein lacking all or a portion of a domain, such as all or a portion of the PRB domain, refers a polypeptide that has a deletion of one or more amino acids or all of the amino acids of the domain, such as the PRB domain, compared to a reference or unmodified protein. Amino acids deleted in a polypeptide lacking all or part of a domain can be contiguous, but need not be contiguous amino acids within the domain of the cognate polypeptide. Polypeptides that lack all or a part of a domain can include the loss or reduction of an activity of the polypeptide compared to the activity of a reference or unmodified protein.

[0262] As used herein, “active form” refers to any ADA2 enzyme that exhibits adenosine deaminase activity. An active form of an enzyme can contain a full-length sequence of amino acids or can be a catalytically active portion thereof. An active form of an enzyme can be a monomer or a dimer. Typically, an active enzyme is a dimer. An active enzyme is any form that exhibits a catalytic efficiency (k_{cat}/K_{M}) that is at least or at least about 5×10³ M⁻¹s⁻¹, 6×10³ M⁻¹s⁻¹, 7×10³ M⁻¹s⁻¹, 8×10³ M⁻¹s⁻¹, 9×10³ M⁻¹s⁻¹, 1×10⁴ M⁻¹s⁻¹, 2×10⁴ M⁻¹s⁻¹, 3×10⁴ M⁻¹s⁻¹4×10⁴ M⁻¹s⁻¹5×10⁴ M⁻¹s⁻¹6×10⁴ M⁻¹s⁻¹7×10⁴ M⁻¹s⁻¹8×10⁴ M⁻¹s⁻¹9×10⁴ M⁻¹s⁻¹, 1×10⁵ M⁻¹s⁻¹, 2×10⁵ M⁻¹s⁻¹, 3×10⁵ M⁻¹s⁻¹, 4×10⁵ M⁻¹s⁻¹, 5×10⁵ M⁻¹s⁻¹, 6×10⁵ M⁻¹s⁻¹, 7×10⁵ M⁻¹s⁻¹, 8×10⁵ M⁻¹s⁻¹, 9×10⁵ M⁻¹s⁻¹, 1×10⁶ M⁻¹s⁻¹, 2×10⁶ M⁻¹s⁻¹, 3×10⁶ M⁻¹s⁻¹, 4×10⁶ M⁻¹s⁻¹, 5×10⁶ M⁻¹s⁻¹1 or greater.

[0263] As used herein, a “multimer” refers to a molecule composed of several identical or different subunits held together or associated, for example, by non-covalent interactions.

[0264] As used herein, a “dimer” refers to a molecule that contains two polypeptides linked together. Typically, the polypeptides are non-covalently linked. For example, an ADA2 dimer is formed by nonpolar intersubunit interactions, including hydrophobic interaction, between residues of two polypeptides.

[0265] As used herein, a “homodimer” refers to a dimer that is formed by two identical polypeptides.

[0266] As used herein, a “heterodimer” refers to a dimer that is formed by two different polypeptides.

[0267] As used herein, a “monomer” refers to a single protein or polypeptide unit. A monomer has a relatively low molecular weight compared to dimers or other multimers. A monomer can exist independently, or it can associate with other molecules to form a dimer or other multimer.

[0268] As used herein a “corresponding form” with reference to an ADA2 protein means that when comparing a property or activity of two ADA2 proteins, the property is compared using the same structural form of the protein. For example, if its stated that an ADA2 protein has less activity compared to the activity of the corresponding form of a first ADA2 protein, that means that a particular form, such as a dimer, has less activity compared to the dimer of the first ADA2 protein.

[0269] As used herein, a “polypeptide” refers to a linear organic polymer containing a large number of amino acid residues bonded together in a chain, forming part of, or the whole of, a protein molecule.

[0270] As used herein, a “protein” or “protein molecule” or variations thereof refers to a large molecule composed of one or more polypeptide chains made up of a linear sequence of amino acids. Hence, a protein can be a monomer, or can be a dimer or other multimer. A protein can exhibit structural, mechanical, biochemical or signaling activities.

[0271] As used herein, a “polypeptide subunit” or “protein subunit” refers to a single polypeptide or monomer that is capable of assembling with other polypeptides or monomers to form a protein molecule that is a multimeric complex. One subunit is made up of one polypeptide chain.

[0272] As used herein, “variant ADA2 protein” refers to an ADA2 protein, including any form thereof such as a full-length, catalytically active portion, monomer, or dimer, that has one or more amino acid differences compared to an unmodified ADA2 protein. The one or more amino acid differences can be amino acid mutations, such as one or more amino acid replacements (substitutions), insertions or deletions, or can be insertions or deletions of entire domains, and any combination thereof. Typically, a variant ADA2 protein has one or more modifications in primary sequence compared to an unmodified ADA2 protein. For example, a variant ADA2 provided herein can have at least 1, 2, 3, 4, 5, 6, 7, 8, 9, 10, 11, 12, 13, 14, 15, 16, 17, 18, 19, 20, 21, 22, 23, 24, 25, 26, 27, 28, 29, 30, 35, 40, 45, 50, 55, 60, 65, 70, 75, 80, 85 or more amino acid differences compared to an unmodified ADA2 protein. Any modification is contemplated as long as the resulting protein exhibits adenosine deaminase activity.

[0273] As used herein, modification refers to modification of a sequence of amino acid residues of a polypeptide or a sequence of nucleotides in a nucleic acid molecule and includes deletions, insertions, and replacements of amino acids and nucleotides, respectively.

[0274] Modifications also can include post-translational modifications or other changes to the molecule that can occur due to conjugation or linkage, directly or indirectly, to another moiety. Methods of modifying a polypeptide are routine to those of skill in the art, such as by using recombinant DNA methodologies.

[0275] As used herein, “deletion,” when referring to modification of a nucleic acid or polypeptide sequence, refers to the removal of one or more nucleotides or amino acids compared to a sequence, such as a target polynucleotide or polypeptide or a native or wild-type sequence. Thus, an amino acid sequence or nucleic acid molecule that contains one or more deletions compared to a wild-type sequence, contains one or more fewer amino acids or nucleotides within the linear length of the sequence.

[0276] As used herein, “insertion” when referring to modification of a nucleic acid or amino acid sequence, describes the inclusion of one or more additional nucleotides or amino acids, within a target, native, wild-type or other related sequence. Thus, an amino acid or nucleic acid molecule that contains one or more insertions compared to a wild-type sequence, contains one or more additional amino acids or nucleotides within the linear length of the sequence.

[0277] As used herein, “additions” to nucleic acid and amino acid sequences describe addition of nucleotides or amino acids onto either termini compared to another sequence.

[0278] As used herein, “substitution” or “replacement” with respect to a modification refers to the replacing of one or more nucleotides or amino acids in a native, target, wild-type or other nucleic acid or polypeptide sequence with an alternative nucleotide or amino acid, without changing the length (as described in numbers of residues) of the molecule. Thus, one or more substitutions in a molecule does not change the number of amino acid residues or nucleotides of the molecule. Amino acid replacements compared to a particular polypeptide can be expressed in terms of the number of the amino acid residue along the length of the polypeptide sequence or a reference polypeptide sequence. For example, a modified polypeptide having a modification in the amino acid at the 19^{th} position of the amino acid sequence that is a substitution of Isoleucine (Ile; I) for cysteine (Cys; C) can be expressed as “replacement with Cys or C at a position corresponding to position 19,” 119C, Ile19Cys, or simply C19, to indicate that the amino acid at the modified 19^{th} position is a cysteine. In this example, the molecule having the substitution has a modification at Ile 19 of the unmodified polypeptide.

[0279] As used herein, “unmodified polypeptide” or “unmodified ADA2” and grammatical variations thereof refer to a starting polypeptide that is selected for modification as provided herein. The starting polypeptide can be a naturally-occurring, wild-type form of a polypeptide. Exemplary of an unmodified ADA2 polypeptide is human ADA2 set forth in SEQ ID NO:5, or a catalytically active portion thereof. In addition, the starting polypeptide can be altered or mutated, such that it differs from a native wild type isoform but is nonetheless referred to herein as a starting unmodified polypeptide relative to the subsequently modified polypeptides produced herein. Thus, existing proteins known in the art that have been modified to have a desired increase or decrease in a particular activity or property compared to an unmodified reference protein can be selected and used as the starting unmodified polypeptide. For example, a protein that has been modified from its native form by one or more single amino acid changes and possesses either an increase or decrease in a desired property, such as a change in an amino acid residue or residues to alter glycosylation, can be a target protein, referred to herein as unmodified, for further modification of either the same or a different property.

[0280] As used herein, “corresponding residues” refers to residues that occur at aligned loci. For purposes herein, the amino acid sequence of a protein is aligned to precursor ADA2 set forth in SEQ ID NO:2 or its mature form set forth in SEQ ID NO:5 (see FIG. 1) or to the ADA2 sequence used for Zavialov numbering, the numbering of residues used in Zavialov et al. (2010) J. Biol. Chem. 285:12367-12377 and in PDB accession Nos. 3LGG and 3LGD, set forth in SEQ ID NO:4. Related or variant polypeptides are aligned by any method known to those of skill in the art. Such methods typically maximize matches, and include methods such as using manual alignments and by using the numerous alignment programs available (for example, BLASTP) and others known to those of skill in the art. By aligning the sequences of ADA2 polypeptides, one of skill in the art can identify corresponding residues, using conserved and identical amino acid residues as guides. Generally, recitation that amino acids of a polypeptide correspond to amino acids in a disclosed sequence refers to amino acids identified upon alignment of the polypeptide with the disclosed sequence to maximize identity or homology (where conserved amino acids are aligned) using a standard alignment algorithm, such as the GAP algorithm.

[0281] As used herein, a “property” of an ADA2 refers to a physical or structural property, such as three-dimensional structure, pI, half-life, conformation and other such physical characteristics.

[0282] As used herein, an “activity” of an ADA2 or “ADA2 activity” refers to any activity exhibited by the active form of an ADA2 protein, typically the dimer form. Such activities can be tested in vitro and/or in vivo and include, but are not limited to, adenosine deaminase activity, growth factor activity, ability to bind heparin and/or ability to bind to an adenosine receptor (ADR). Activity can be assessed in vitro or in vivo using recognized assays, for example, by measuring adenosine deaminase activity in vitro or in vivo. The results of such assays indicate that a polypeptide exhibits an activity that can be correlated to activity of the polypeptide in vivo, in which in vivo activity can be referred to as biological activity. Assays to determine functionality or activity of modified forms of ADA2 are known to those of skill in the art, and exemplary assays are described herein.

[0283] As used herein, “adenosine deaminase activity” refers to the ability of an enzyme to catalyze the hydrolytic deamination of adenosine to form inosine. ADA2 activity can be assessed, directly or indirectly, by measuring the rate of production of a product of the enzymatic reaction. For example, the production of inosine or ammonia can be directly or indirectly measured. In other examples, the decrease of the substrate of the enzyme, e.g., adenosine or 2-deoxyadenosine, is measured. Assays to assess adenosine deaminase activity are known to those of skill in the art, and include but are not limited to, assays in which the decrease of the substrate, or the increase of the product, is measured directly by spectrophotometry, or indirectly, by subsequent enzymatic or oxidation-reduction reactions that use chromogenic substrates or change the absorbance spectra of the reaction.

[0284] As used herein, “increased adenosine deaminase activity” refers to an enhanced ability of an ADA2 protein, for example a variant ADA2 protein, to exhibit adenosine deaminase activity as compared with a reference protein. For example, the ability of a variant ADA2 protein to exhibit adenosine deaminase activity can be greater than the adenosine deaminase activity of the unmodified ADA2 protein. The adenosine deaminase activity can be increased by at least about 1%, 2%, 3%, 4%, 5%, 6%, 7%, 8%, 9%, 10%, 20%, 30%, 40%, 50%, 60%, 70%, 80%, 90%, 100%, 200%, 300%, 400%, 500%, 600%, 700%, 800%, 900%, 1000%, or more compared to the adenosine deaminase activity of reference or an unmodified protein.

[0285] As used herein, a glycosylation site refers to an amino position in a polypeptide to which a carbohydrate moiety can be attached. Typically, a glycosylated protein contains one or more amino acid residues, such as asparagine or serine, for the attachment of the carbohydrate moieties.

[0286] As used herein, a native glycosylation site refers to an amino position to which a carbohydrate moiety is attached in a wild-type polypeptide. There are four N-linked native glycosylation sites in ADA2 corresponding to residues N98, N145, N156 and N349 with reference to SEQ ID NO:5.

[0287] As used herein, a non-native glycosylation site refers to an amino position to which a carbohydrate moiety is attached in a modified polypeptide that is not present in a wild-type polypeptide. Non-native glycosylation sites can be introduced into a ADA2 polypeptide by amino acid replacement. O-glycosylation sites can be created, for example, by amino acid replacement of a native residue with a serine or threonine. N-glycosylation sites can be created, for example, by establishing the motif Asn-Xaa-Ser/Thr/Cys, where Xaa is not proline. Creation of this consensus sequence by amino acid modification can involve, for example, a single amino acid replacement of a native amino acid residue with an asparagine, a single amino acid replacement of a native amino acid residue with a serine, threonine or cysteine, or a double amino acid replacement involving a first amino acid replacement of a native residue with an asparagine and a second amino acid replacement of native residue with a serine, threonine or cysteine, or an insertion of a non-native N-glycosylation motif, such as the motif Asn-Xaa-Ser/Thr/Cys, where Xaa is not proline.

[0288] As used herein, “level of glycosylation” refers to the number of glycosylation sites capable of being occupied by a glycan, for example, upon expression in a host cell capable of glycosylation.

[0289] As used herein, increases with reference to the level of glycosylation means that there is a greater number of glycosylation sites capable of being occupied by a glycan with reference to an unmodified or wildtype ADA2. A variant ADA2 that exhibits an increased level of glycosylation can be hyperglycosylated if there is a greater number of glycosylation sites occupied by a glycan compared to the unmodified or wildtype ADA2.

[0290] As used herein, “protein stability” refers to a measure of the maintenance of one or more physical properties of a protein in response to an environmental condition (e.g. an elevated temperature). In one embodiment, the physical property is the maintenance of the covalent structure of the protein (e.g. the absence of proteolytic cleavage, unwanted oxidation or deamidation). In another embodiment, the physical property is the presence of the protein in a properly folded state (e.g. the absence of soluble or insoluble aggregates or precipitates). In one embodiment, stability of a protein is measured by assaying a biophysical property of the protein, for example thermal stability, pH unfolding profile, stable removal of glycosylation, solubility, biochemical function (e.g., ability to bind to a protein such as a receptor or enzymatic activity) and/or combinations thereof. In another embodiment, biochemical function is demonstrated by the binding affinity of an interaction. Stability can be measured using methods known in the art and/or described herein.

[0291] As used herein, “half-life” refers to the time that a living body requires to eliminate one half of the quantity of an administered substance through its normal channels of elimination. The normal channels of elimination generally include the kidneys and liver, but can include other excretion pathways. A half-life can be described as the time it takes the concentration of a substance to halve its concentration from steady state or from a certain point on the elimination curve. A half-life typically is measured in the plasma and can be determined by giving a single dose of drug, and then measuring the concentration of the drug in the plasma at times to determine the relationship between time and decline in concentration as the substance is eliminated.

[0292] As used herein, “increased half-life” refers to a longer half-life of a protein molecule compared to a reference protein. Hence, it means that the time that it takes the concentration of a substance to halve its concentration is longer than for the time it takes the concentration of a reference protein to halve. The half-life can be increased by at least 1%, 2%, 3%, 4%, 5%, 6%, 7%, 8%, 9%, 10%, 20%, 30%, 40%, 50%, 60%, 70%, 80%, 90%, 100%, 200%, 300%, 400%, 500%, 600%, 700%, 800%, 900%, 1000%, 1100%, 1200%, 1300%, 1400%, 1500%, 1600%, 1700%, 1800%, 1900%, 2000%, 3000%, 4000%, 5000%, 6000%, 7000%, 8000%, 9000%, 10000% or more compared to the half-life of an unmodified polypeptide. Assays to assess half-life are known and standard in the art.

[0293] As used herein, “thermal stability” refers to the measure of the resistance to denaturation of a protein that occurs upon exposure to high or elevated temperatures, and hence is the ability of a protein to function at a particular temperature. A polypeptide is thermally stable at a temperature if it retains at least 50%, 55%, 60%, 65%, 70%, 75%, 80%, 85%, 90%, 95% or more of an activity or a property of the polypeptide at the temperature. Thermal stability can be measured either by known procedures or by the methods described herein. In certain embodiments, thermal stability is evaluated by measuring the melting temperature (Tm) of a protein or by a thermal challenge assay (Tc).

[0294] As used herein, “increased thermal stability” refers to a higher degree of resistance to denaturation of a protein. For example, it can mean that a protein is thermally stable at a higher temperature than a reference proteins. It also can mean that a protein exhibits greater retained activity at a particular temperature compared to the activity of a reference protein at the same temperature. In some cases, an increased thermal stability means that a protein has a greater melting temperature Tm compared to a reference protein. For example, the thermal stability is increased if the Tm of a protein is at least 0.1° C., 0.2° C., 0.3° C., 0.4° C., 0.5° C., 0.6° C., 0.7° C., 0.8° C., 0.9° C., 1.0° C., 1.5° C., 2.0° C. 2.5° C. 3.0° C., 4.0° C., 5.0° C. or more greater than a reference or unmodified protein.

[0295] As used herein, the melting temperature (Tm; also called transition temperature) is the temperature at the midpoint of a thermal transition curve where 50% of molecules of a composition are in a folded state. Hence, it is the temperature at which 50% of a macromolecule becomes denatured, and is a standard parameter for describing the thermal stability of a protein. Methods to determine Tm are well-known to a skilled artisan and include, for example, analytical spectroscopy methods such as, but are not limited to, differential scanning calorimetry (DSC), circular dichroism (CD) spectroscopy), fluorescence emission spectroscopy or nuclear magnetic resonance (NMR) spectroscopy.

[0296] As used herein, “pH optima” or “pH optimum” refers to the pH at which any enzymatic reaction, such as adenosine deaminase activity, is most effective under a given set of conditions. With respect to its adenosine deaminase activity, ADA2 exhibits a pH optima that is or is about 6.5.

[0297] As used herein, “altered pH optima” or “altered pH optimum” refers to a change (increased or decreased) in the pH that is the optimal pH for adenosine deaminase activity. An increased pH optimum occurs if the pH optimum is greater than 0.1, 0.2, 0.3, 0.4, 0.5, 0.6, 0.7, 0.8, 0.9, 1.0, 1.1, 1.2, 1.3, 1.4, 1.5, 1.0, 2.5 or more compared to the pH optimum of a reference or unmodified protein. A decreased pH optimum occurs if the pH optimum is lower than or less than 0.1, 0.2, 0.3, 0.4, 0.5, 0.6, 0.7, 0.8, 0.9, 1.0, 1.1, 1.2, 1.3, 1.4, 1.5, 1.0, 2.5 or more less to the pH optimum of a reference or unmodified protein.

[0298] As used herein, “bind,” “bound” or grammatical variations thereof refers to the participation of a molecule in any attractive interaction with another molecule, resulting in a stable association in which the two molecules are in close proximity to one another. Binding includes, but is not limited to, non-covalent bonds, covalent bonds (such as reversible and irreversible covalent bonds), and includes interactions between molecules such as, but not limited to, proteins, nucleic acids, carbohydrates, lipids, and small molecules, such as chemical compounds including drugs. Typically, bind involves the association of two or more molecules by one or more noncovalent bonds. Binding can be assessed by standard methods known in the art, including but not limited to, equilibrium dialysis, radioimmunoassay radiolabeled target antigen, immunoassays (e.g. enzyme linked immunosorbent assay (ELISA)), surface plasmon resonance (SPR), isothermal titration calorimetry (ITC) and other methods well known to a skilled artisan.

[0299] As used herein, binding activity refer to characteristics of a molecule, e.g. a polypeptide, relating to whether or not, and how, it binds one or more binding partners. Binding activities include the ability to bind the binding partner(s), the affinity with which it binds to the binding partner (e.g. high affinity), the avidity with which it binds to the binding partner, the strength of the bond with the binding partner and/or specificity for binding with the binding partner.

[0300] As used herein, “heparin binding” refers to the ability of ADA2 to bind heparin, which is a highly sulfated glycosaminoglycan made up of variably sulfated repeating disaccharide units. Commonly, a heparin disaccharide unit is made up of a 2-O-sulfated iduronic acid and 6-O-sulfated, N-sulfated glucosamine, IdoA(2S)-GlcNS(6S).

[0301] As used herein, “reduced heparin binding” or “attenuated heparin binding” refers to a lessening or reduced binding activity for heparin. For example, it can mean that the level or degree of binding of an ADA2 protein, such as a variant ADA2, is less than a reference protein. For example, the heparin binding is reduced if the level or degree of binding of an ADA2 protein to heparin is no more than 1%, 2%, 3%, 4%, 5%, 6%, 7%, 8%, 9%, 10%, 15%, 20%, 25%, 30%, 35%, 40%, 45%, 50%, 55%, 60%, 65%, 70%, 75%, 80%, 85%, 90%, or 95% of the binding of a reference or unmodified ADA2 protein to heparin. In some cases, heparin binding is reduced at least or at least about 0.5-fold, 1-fold, 1.5-fold, 2-fold, 3-fold, 4-fold, 5-fold, 6-fold, 7-fold, 8-fold, 9-fold, 10-fold or more compared to the heparin binding of a reference or unmodified ADA2 protein.

[0302] As used herein, “adenosine receptor” or ADR refers to a class of G-protein coupled receptors that bind adenosine. Adenosine receptors also can bind to ADA2. There are four types of adenosine receptors. For example, in humans, the ADRs are designated A₁ (SEQ ID NO:533), A_{2A}(SEQ ID NO:534), A_{2B} (SEQ ID NO:535) and A₃ (SEQ ID NOS:536-538).

[0303] As used herein, “receptor binding” refers to the ability of ADA2 to bind an adenosine receptor.

[0304] As used herein, “reduced receptor binding” refers to a lessening or reduced binding activity for an adenosine receptor. For example, it can mean that the level or degree of binding of an ADA2 protein, such as a variant ADA2, is less than the binding of a reference protein for the same adenosine receptor. For example, receptor binding is reduced if the level or degree of an ADA2 protein for an adenosine receptor is no more than 1%, 2%, 3%, 4%, 5%, 6%, 7%, 8%, 9%, 10%, 15%, 20%, 25%, 30%, 35%, 40%, 45%, 50%, 55%, 60%, 65%, 70%, 75%, 80%, 85%, 90%, or 95% of the binding of a reference or unmodified ADA2 protein for the same adenosine receptor. In some cases, receptor binding is reduced at least or at least about 0.5-fold, 1-fold, 1.5-fold, 2-fold, 3-fold, 4-fold, 5-fold, 6-fold, 7-fold, 8-fold, 9-fold, 10-fold or more compared to the receptor binding of a reference or unmodified ADA2 protein for the same adenosine receptor.

[0305] As used herein, recitation that proteins are “compared under the same conditions” means that different proteins are treated identically or substantially identically such that any one or more conditions that can influence the activity or properties of a protein or agent are not varied or not substantially varied between the test agents. For example, when the adenosine deaminase activity of an ADA2 is compared to an unmodified ADA2 protein any one or more conditions such as the amount or concentration of the protein; presence, including amount, of excipients, carriers or other components in a formulation other than the active agent; temperature; pH and/or other conditions are identical or substantially identical between and among the compared polypeptides.

[0306] As used herein, “immune checkpoints” refer to inhibitory pathways of the immune system that are responsible for maintaining self-tolerance and modulating the duration and amplitude of physiological immune responses in peripheral tissues in order to minimize collateral tissue damage. Immune checkpoints are regulated by immune checkpoint proteins.

[0307] An “immune checkpoint protein” is a protein, typically a receptor (e.g., CTLA4 or PD-1) or a ligand (e.g., PD-L1) that regulates or modulates the extent of an immune response. The immune checkpoint proteins can be inhibitory or stimulatory. In particular, the immune checkpoint proteins are inhibitory to the activation of the immune response. Thus, inhibition of an inhibitory immune checkpoint protein acts to stimulate or activate an immune response, such as T cell activation and proliferation.

[0308] As used herein, an “immune checkpoint inhibitor” or “immune checkpoint inhibiting agent,” or “immune checkpoint blocking agent” refers to an agent that binds an inhibitory immune checkpoint protein and blocks its activity. The inhibition can be competitive or non-competitive inhibition that can be steric or allosteric. In cases where an immune checkpoint protein is an immune stimulating protein, an immune checkpoint inhibitor acts to promote the activity of the immune stimulating protein, such as by binding and activating the stimulatory immune checkpoint protein or by inhibiting by interfering with, such as by binding or deactivating, inhibitors of the stimulatory immune checkpoint protein. An example of an immune checkpoint inhibitor is an anti-immune checkpoint protein antibody.

[0309] A “target” of an immune checkpoint inhibitor is the immune checkpoint protein to which the immune checkpoint inhibitor or immune checkpoint inhibiting agent binds to block activity. Typically, the immune checkpoint inhibitor specifically binds to the target. For example, the target of the exemplary anti-CTLA4 antibody designated ipilimumab is CTLA4.

[0310] As used herein, an anti-immune checkpoint protein antibody, refers to any antibody that specifically binds to an immune checkpoint protein or a soluble fragment thereof and blocks. An anti-immune checkpoint protein antibody typically binds an immune checkpoint ligand protein or an immune checkpoint receptor protein and blocks the binding of a receptor to the target immune checkpoint ligand protein or a ligand to the target immune checkpoint receptor protein, thereby preventing the inhibitory signal transduction that suppresses an immune response. Hence, anti-immune checkpoint protein antibodies are immune checkpoint inhibitors. Reference to anti-immune checkpoint protein antibodies herein include full-length antibodies and antigen-binding fragments thereof that specifically bind to an immune checkpoint ligand or receptor protein. Exemplary anti-immune checkpoint protein antibodies include, but are not limited to, anti-cytotoxic T-lymphocyte-associated protein 4 (CTLA4) antibodies and anti-programmed cell death protein 1 (PD-1) antibodies.

[0311] As used herein, an antigen-binding fragment of an anti-immune checkpoint protein antibody refers to an antibody derived from an anti-immune checkpoint protein antibody but that is less than the full length sequence of the anti-immune checkpoint protein antibody but contains at least a portion of the variable regions (heavy and light) of the antibody sufficient to form an antigen binding site (e.g., one or more CDRs, and generally all CDRs) and thus retains the binding specificity and/or activity of the anti-immune checkpoint protein antibody.

[0312] As used herein, anti-CTLA4 antibody refers to any antibody that specifically binds to cytotoxic T-lymphocyte-associated protein 4 (CTLA4) or a soluble fragment thereof and blocks the binding of ligands to CTLA4, thereby resulting in competitive inhibition of CTLA4 and inhibition of CTLA4-mediated inhibition of T cell activation. Hence, anti-CTLA4 antibodies are CTLA4 inhibitors. Reference to anti-CTLA4 antibodies herein include a full-length antibody and derivatives thereof, such as antigen-binding fragments thereof that specifically bind to CTLA4. Exemplary anti-CTLA4 antibodies include, but are not limited to, Ipilimumab or Tremelimumab, or a derivative or antigen-binding fragment thereof.

[0313] As used herein, anti-PD-1 antibody refers to any antibody that specifically binds to programmed cell death protein 1 (PD-1) or a soluble fragment thereof and blocks the binding of ligands to PD-1, thereby resulting in competitive inhibition of PD-1 and inhibition of PD-1-mediated inhibition of T cell activation. Hence, anti-PD-1 antibodies are PD-1 inhibitors. Reference to anti-PD-1 antibodies herein include a full-length antibody and derivatives thereof, such as antigen-binding fragments thereof that specifically bind to PD-1. Exemplary anti-PD-1 antibodies include, but are not limited to, Nivolumab, MK-3475, Pidilizumab, or a derivative or antigen-binding fragment thereof.

[0314] As used herein, anti-PD-L1 antibody refers to an antibody that specifically binds to programed death-ligand 1 (PD-L1) or a soluble fragment thereof and blocking the binding of the ligand to PD-1, thereby resulting in competitive inhibition of PD-1 and inhibition of PD-1-mediated inhibition of T cell activity. Hence, anti-PD-L1 antibodies are PD-1 inhibitors. Reference to anti-PD-L1 antibodies herein include a full-length antibody and derivatives thereof, such as antigen-binding fragments thereof that specifically bind to PD-L1. Exemplary anti-PD-L1 antibodies include, but are not limited to, BMS-936559, MPDL3280A, MEDI4736 or a derivative or antigen-binding fragment thereof.

[0315] As used herein, “antibody” refers to immunoglobulins and immunoglobulin fragments, whether natural or partially or wholly synthetically, such as recombinantly, produced, including any fragment thereof containing at least a portion of the variable heavy chain and light region of the immunoglobulin molecule that is sufficient to form an antigen binding site and, when assembled, to specifically bind antigen. Hence, an antibody includes any protein having a binding domain that is homologous or substantially homologous to an immunoglobulin antigen-binding domain (antibody combining site). For example, an antibody refers to an antibody that contains two heavy chains (which can be denoted H and H′) and two light chains (which can be denoted L and L′), where each heavy chain can be a full-length immunoglobulin heavy chain or a portion thereof sufficient to form an antigen binding site (e.g., heavy chains include, but are not limited to, VH chains, VH-CH1 chains and VH-CH1-CH2-CH3 chains), and each light chain can be a full-length light chain or a portion thereof sufficient to form an antigen binding site (e.g., light chains include, but are not limited to, VL chains and VL-CL chains). Each heavy chain (H and H′) pairs with one light chain (L and L′, respectively). Typically, antibodies minimally include all or at least a portion of the variable heavy (VH) chain and/or the variable light (VL) chain. The antibody also can include all or a portion of the constant region.

[0316] For purposes herein, the term antibody includes full-length antibodies and portions thereof including antibody fragments. Antibody fragments, include, but are not limited to, Fab fragments, Fab′ fragments, F(ab′)₂ fragments, Fv fragments, disulfide-linked Fvs (dsFv), Fd fragments, Fd′ fragments, single-chain Fvs (scFv), single-chain Fabs (scFab), diabodies, anti-idiotypic (anti-Id) antibodies, or antigen-binding fragments of any of the above. Antibody also includes synthetic antibodies, recombinantly produced antibodies, multispecific antibodies (e.g., bispecific antibodies), human antibodies, non-human antibodies, humanized antibodies, chimeric antibodies, and intrabodies. Antibodies provided herein include members of any immunoglobulin type (e.g., IgG, IgM, IgD, IgE, IgA and IgY), any class (e.g., IgG1, IgG2, IgG3, IgG4, IgA1 and IgA2) or subclass (e.g., IgG2a and IgG2b).

[0317] As used herein, the phrase “derived from” or “derivative” when referring to antibody fragments derived from another antibody, such as a monoclonal antibody, refers to the engineering of antibody fragments (e.g., Fab, F(ab′), F(ab′)₂, single-chain Fv (scFv), Fv, dsFv, diabody, Fd and Fd′ fragments) that retain the binding specificity of the original or parent antibody. Such fragments can be derived by a variety of methods known in the art, including, but not limited to, enzymatic cleavage, chemical crosslinking, recombinant means or combinations thereof. Generally, the derived antibody fragment shares the identical or substantially identical heavy chain variable region (V_{H}) and light chain variable region (V_{L}) of the parent antibody, such that the antibody fragment and the parent antibody bind the same epitope.

[0318] As used herein, an anti-hyaluronan agent refers to any agent that modulates hyaluronan (HA) synthesis or degradation, thereby altering hyaluronan levels in a tissue or cell. For purposes herein, anti-hyaluronan agents reduce hyaluronan levels in a tissue or cell compared to the absence of the agent. Such agents include compounds that modulate the expression of genetic material encoding HA synthase (HAS) and other enzymes or receptors involved in hyaluronan metabolism, or that modulate the proteins that synthesize or degrade hyaluronan including HAS function or activity. The agents include small-molecules, nucleic acids, peptides, proteins or other compounds. For example, anti-hyaluronan agents include, but are not limited to, antisense or sense molecules, antibodies, enzymes, small molecule inhibitors and HAS substrate analogs.

[0319] As used herein, a hyaluronan degrading enzyme refers to an enzyme that catalyzes the cleavage of a hyaluronan polymer (also referred to as hyaluronic acid or HA) into smaller molecular weight fragments. Exemplary hyaluronan degrading enzymes are hyaluronidases, and particular chondroitinases and lyases that have the ability to depolymerize hyaluronan. Exemplary chondroitinases that are hyaluronan degrading enzymes include, but are not limited to, chondroitin ABC lyase (also known as chondroitinase ABC), chondroitin AC lyase (also known as chondroitin sulfate lyase or chondroitin sulfate eliminase) and chondroitin C lyase.

[0320] As used herein, hyaluronidase refers to a class of hyaluronan degrading enzymes. Hyaluronidases include bacterial hyaluronidases (EC 4.2.2.1 or EC 4.2.99.1), hyaluronidases from leeches, other parasites, and crustaceans (EC 3.2.1.36), and mammalian-type hyaluronidases (EC 3.2.1.35). Hyaluronidases include any of non-human origin including, but not limited to, murine, canine, feline, leporine, avian, bovine, ovine, porcine, equine, piscine, ranine, bacterial, and any from leeches, other parasites, and crustaceans. For example, hyaluronidases include those of human origin. Exemplary human hyaluronidases include HYAL1, HYAL2, HYAL3, HYAL4, and PH20 (SEQ ID NO:480 and 551). Also included amongst hyaluronidases are soluble hyaluronidases, including, ovine and bovine PH20, soluble human PH20 and soluble rHuPH20. Examples of commercially available bovine or ovine soluble hyaluronidases include Vitrase® (ovine hyaluronidase), Amphadase® (bovine hyaluronidase) and Hydase™ (bovine hyaluronidase).

[0321] Reference to hyaluronan degrading enzymes or hyaluronidase includes precursor hyaluronan degrading enzyme polypeptides and mature hyaluronan degrading enzyme polypeptides (such as those in which a signal sequence has been removed), truncated forms thereof that have activity, and includes allelic variants and species variants, variants encoded by splice variants, and other variants, including polypeptides that have at least 40%, 45%, 50%, 55%, 65%, 70%, 75%, 80%, 85%, 90%, 95%, 96%, 97%, 98%, 99% or more sequence identity to the precursor polypeptides, or the mature forms thereof. Hyaluronan degrading enzymes and hyaluronidase also include those that contain chemical or posttranslational modifications and those that do not contain chemical or posttranslational modifications. Such modifications include, but are not limited to, PEGylation, albumination, glycosylation, famesylation, carboxylation, hydroxylation, phosphorylation, and other polypeptide modifications known in the art. A truncated PH20 hyaluronidase is any C-terminal shortened form thereof, particularly forms that are truncated and neutral active when N-glycosylated.

[0322] As used herein, “bovine PH20” refers to a bovine hyaluronidase purified from bovine testicular extracts (see U.S. Pat. Nos. 2,488,564, 2,488,565, 2,806,815, 2,808,362, 2,676,139, 2,795,529, 5,747,027 and 5,827,721). Examples of commercially available purified bovine testicular hyaluronidases include Amphadase® and Hydase™, and bovine hyaluronidases, including, but not limited to, those available from Sigma Aldrich, Abnova, EMD Chemicals, GenWay Biotech, Inc., Raybiotech, Inc., and Calzyme. Also included are recombinantly produced bovine hyaluronidases.

[0323] As used herein, “ovine PH20” refers to an ovine hyaluronidase purified from ovine testicular extracts (see U.S. Pat. Nos. 2,488,564, 2,488,565 and 2,806,815 and International PCT Publication No. WO2005/118799). Examples of commercially available purified ovine testicular extract include Vitrase®, and ovine hyaluronidases, including, but not limited to, those available from Sigma Aldrich, Cell Sciences, EMD Chemicals, GenWay Biotech, Inc., Mybiosource.com and Raybiotech, Inc. Also included are recombinantly produced ovine hyaluronidases.

[0324] As used herein, “PH20” refers to a type of hyaluronidase that occurs in sperm and is neutral-active. PH-20 occurs on the sperm surface, and in the lysosome-derived acrosome, where it is bound to the inner acrosomal membrane. PH20 includes those of any origin including, but not limited to, human, chimpanzee, Cynomolgus monkey, Rhesus monkey, murine, bovine, ovine, guinea pig, rabbit and rat origin. Exemplary PH20 polypeptides include those from human (precursor set forth in SEQ ID NO:551 and mature set forth in SEQ ID NO:480).

[0325] As used herein, a “soluble PH20” refers to any form of PH20 that is soluble under physiologic conditions. A soluble PH20 can be identified, for example, by its partitioning into the aqueous phase of a Triton® X-114 solution at 37° C. (Bordier et al., (1981) J. Biol. Chem., 256:1604-7). Membrane-anchored PH20, such as lipid-anchored PH20, including GPI-anchored PH20, will partition into the detergent-rich phase, but will partition into the detergent-poor or aqueous phase following treatment with Phospholipase-C. Included among soluble PH20 are membrane-anchored PH20 in which one or more regions associated with anchoring of the PH20 to the membrane has been removed or modified, where the soluble form retains hyaluronidase activity. Soluble PH20 also includes recombinant soluble PH20 and those contained in or purified from natural sources, such as, for example, testes extracts from sheep or cows. An example of such soluble PH20 is soluble human PH20. Exemplary soluble human PH20 polypeptides are set forth in any of SEQ ID NOS:481-488, 493-514, or 526-532, or has a sequence of amino acids that is at least 85%, 86%, 87%, 88%, 89%, 90%, 91%, 92%, 93%, 94%, 95%, 96%, 97%, 98% or 99% sequence identity to a sequence of amino acids set forth in any of SEQ ID NOS:481-488, 493-514, or 526-532 and is soluble and retains hyaluronidase activity.

[0326] As used herein, “soluble recombinant human PH20 (rHuPH20)” refers to a composition containing soluble form of human PH20 as recombinantly expressed and secreted in Chinese Hamster Ovary (CHO) cells. Soluble rHuPH20 is encoded by nucleic acid molecule that includes the signal sequence and encodes the polypeptide set forth in SEQ ID NO:481. The nucleic acid encoding soluble rHuPH20 is expressed in CHO cells which secrete the mature polypeptide. As produced in the culture medium, there is heterogeneity at the C-terminus so that the product includes a mixture of species that can include any one or more of SEQ ID NO:481-486 in various abundance.

[0327] As used herein, “hyaluronidase activity” refers to the ability to enzymatically catalyze the cleavage of hyaluronic acid. The United States Pharmacopeia (USP) XXII assay for hyaluronidase determines hyaluronidase activity indirectly by measuring the amount of higher molecular weight hyaluronic acid, or hyaluronan, (HA) substrate remaining after the enzyme is allowed to react with the HA for 30 min at 37° C. (USP XXII-NF XVII (1990) 644-645 United States Pharmacopeia Convention, Inc., Rockville, Md.). A Reference Standard solution can be used in an assay to ascertain the relative activity, in units, of any hyaluronidase. In vitro assays to determine the hyaluronidase activity of hyaluronidases, such as PH20, including soluble PH20 and esPH20, are known in the art and described herein. Exemplary assays include the microturbidity assay that measures cleavage of hyaluronic acid by hyaluronidase indirectly by detecting the insoluble precipitate formed when the uncleaved hyaluronic acid binds with serum albumin and the biotinylated-hyaluronic acid assay that measures the cleavage of hyaluronic acid indirectly by detecting the remaining biotinylated-hyaluronic acid non-covalently bound to microtiter plate wells with a streptavidin-horseradish peroxidase conjugate and a chromogenic substrate. Reference Standards can be used, for example, to generate a standard curve to determine the activity in Units of the hyaluronidase being tested.

[0328] As used herein, “neutral active” refers to the ability of a PH20 polypeptide to enzymatically catalyze the cleavage of hyaluronic acid at neutral pH (e.g., at or about pH 7.0).

[0329] As used herein, an anti-cancer agent or chemotherapeutic agent refers to an agent that is capable of killing cells that divide rapidly, such as cancer cells. One of skill in the art is familiar with anti-cancer agents, including chemotherapeutic agents. Exemplary agents are described herein.

[0330] As used herein, “biological activity” refers to the in vivo activities of a compound or physiological responses that result upon in vivo administration of a compound, composition or other mixture. Biological activity, thus, encompasses therapeutic effects and pharmaceutical activity of such compounds, compositions and mixtures. Biological activities can be observed in in vitro systems designed to test or use such activities. Thus, for purposes herein a biological activity of a ADA2 encompasses adenosine deaminase activity.

[0331] As used herein the term “assess”, and grammatical variations thereof, is intended to include quantitative and qualitative determination in the sense of obtaining an absolute value for the activity of a polypeptide, and also of obtaining an index, ratio, percentage, visual or other value indicative of the level of the activity. Assessment can be direct or indirect. For example, detection of cleavage of a substrate by a polypeptide can be by direct measurement of the product, or can be indirectly measured by determining the resulting activity of the cleaved substrate.

[0332] As used herein, “mature numbering” or “standard numbering” refers to the numbering of residues in order based on a mature ADA2 polypeptide. For purposes herein, mature numbering is based on the numbering of residues of mature ADA2 set forth in SEQ ID NO:5.

[0333] As used herein, “Zavialov numbering” refers to the numbering of residues used in Zavialov et al. (2010) J. Biol. Chem. 285:12367-12377 and in PDB accession Nos. 3LGG and 3LGD. Zavialov numbering is based on the numbering of residues of ADA2 as set forth in SEQ ID NO:4. Hence Zavialov numbering can be determined by alignment with SEQ ID NO:4. Table 1 below sets forth the corresponding position numbers between mature numbering and Zavialov numbering. Table 1 provides the sequence of amino acids set forth in SEQ ID NO:4 (reference sequence for Zavialov numbering), its position numbers and the corresponding position numbers for SEQ ID NO:5 (reference sequence for mature numbering as used herein).

TABLE 1
Corresponding Position Numbers for Mature Numbering
(SEQ ID NO: 5) and Zavialov Numbering (SEQ ID NO: 4)

| | | | | | | | | | | |
|---|---|---|---|---|---|---|---|---|---|---|
| SEQ ID NO: 5 (mature) | | | | 1 | 2 | 3 | 4 | 5 | 6 | 7 |
| SEQ ID NO: 4 (Zavialov) | 1 | 2 | 3 | 4 | 5 | 6 | 7 | 8 | 9 | 10 |
| Sequence (SEQ ID NO: 4) | G | G | S | I | D | E | T | R | A | H |
| SEQ ID NO: 5 (mature) | 8 | 9 | 10 | 11 | 12 | 13 | 14 | 15 | 16 | 17 |
| SEQ ID NO: 4 (Zavialov) | 11 | 12 | 13 | 14 | 15 | 16 | 17 | 18 | 19 | 20 |
| Sequence (SEQ ID NO: 4) | L | L | L | K | E | K | M | M | R | L |
| SEQ ID NO: 5 (mature) | 18 | 19 | 20 | 21 | 22 | 23 | 24 | 25 | 26 | 27 |
| SEQ ID NO: 4 (Zavialov) | 21 | 22 | 23 | 24 | 25 | 26 | 27 | 28 | 29 | 30 |
| Sequence (SEQ ID NO: 4) | G | G | R | L | V | L | N | T | K | E |
| SEQ ID NO: 5 (mature) | 28 | 29 | 30 | 31 | 32 | 33 | 34 | 35 | 36 | 37 |
| SEQ ID NO: 4 (Zavialov) | 31 | 32 | 33 | 34 | 35 | 36 | 37 | 38 | 39 | 40 |
| Sequence (SEQ ID NO: 4) | E | L | A | N | E | R | L | M | T | L |
| SEQ ID NO: 5 (mature) | 38 | 39 | 40 | 41 | 42 | 43 | 44 | 45 | 46 | 47 |
| SEQ ID NO: 4 (Zavialov) | 41 | 42 | 43 | 44 | 45 | 46 | 47 | 48 | 49 | 50 |
| Sequence (SEQ ID NO: 4) | K | I | A | E | M | K | E | A | M | R |
| SEQ ID NO: 5 (mature) | 48 | 49 | 50 | 51 | 52 | 53 | 54 | 55 | 56 | 57 |
| SEQ ID NO: 4 (Zavialov) | 51 | 52 | 53 | 54 | 55 | 56 | 57 | 58 | 59 | 60 |
| Sequence (SEQ ID NO: 4) | T | L | I | F | P | P | S | M | H | F |
| SEQ ID NO: 5 (mature) | 58 | 59 | 60 | 61 | 62 | 63 | 64 | 65 | 66 | 67 |
| SEQ ID NO: 4 (Zavialov) | 61 | 62 | 63 | 64 | 65 | 66 | 67 | 68 | 69 | 70 |
| Sequence (SEQ ID NO: 4) | F | Q | A | K | H | L | I | E | R | S |
| SEQ ID NO: 5 (mature) | 68 | 69 | 70 | 71 | 72 | 73 | 74 | 75 | 76 | 77 |
| SEQ ID NO: 4 (Zavialov) | 71 | 72 | 73 | 74 | 75 | 76 | 77 | 78 | 79 | 80 |
| Sequence (SEQ ID NO: 4) | Q | V | F | N | I | L | R | M | M | P |
| SEQ ID NO: 5 (mature) | 78 | 79 | 80 | 81 | 82 | 83 | 84 | 85 | 86 | 87 |
| SEQ ID NO: 4 (Zavialov) | 81 | 82 | 83 | 84 | 85 | 86 | 87 | 88 | 89 | 90 |
| Sequence (SEQ ID NO: 4) | K | G | A | A | L | H | L | H | D | I |
| SEQ ID NO: 5 (mature) | 88 | 89 | 90 | 91 | 92 | 93 | 94 | 95 | 96 | 97 |
| SEQ ID NO: 4 (Zavialov) | 91 | 92 | 93 | 94 | 95 | 96 | 97 | 98 | 99 | 100 |
| Sequence (SEQ ID NO: 4) | G | I | V | T | M | D | W | L | V | R |
| SEQ ID NO: 5 (mature) | 98 | 99 | 100 | 101 | 102 | 103 | 104 | 105 | 106 | 107 |
| SEQ ID NO: 4 (Zavialov) | 101 | 102 | 103 | 104 | 105 | 106 | 107 | 108 | 109 | 110 |
| Sequence (SEQ ID NO: 4) | N | V | T | Y | R | P | H | C | H | I |
| SEQ ID NO: 5 (mature) | 108 | 109 | 110 | 111 | 112 | 113 | 114 | 115 | 116 | 117 |
| SEQ ID NO: 4 (Zavialov) | 111 | 112 | 113 | 114 | 115 | 116 | 117 | 118 | 119 | 120 |
| Sequence (SEQ ID NO: 4) | C | F | T | P | R | G | I | M | Q | F |
| SEQ ID NO: 5 (mature) | 118 | 119 | 120 | 121 | 122 | 123 | 124 | 125 | 126 | 127 |
| SEQ ID NO: 4 (Zavialov) | 121 | 122 | 123 | 124 | 125 | 126 | 127 | 128 | 129 | 130 |
| Sequence (SEQ ID NO: 4) | R | F | A | H | P | T | P | R | P | S |
| SEQ ID NO: 5 (mature) | 128 | 129 | 130 | 131 | 132 | 133 | 134 | 135 | 136 | 137 |
| SEQ ID NO: 4 (Zavialov) | 131 | 132 | 133 | 134 | 135 | 136 | 137 | 138 | 139 | 140 |
| Sequence (SEQ ID NO: 4) | E | K | C | S | K | W | I | L | L | E |
| SEQ ID NO: 5 (mature) | 138 | 139 | 140 | 141 | 142 | 143 | 144 | 145 | 146 | 147 |
| SEQ ID NO: 4 (Zavialov) | 141 | 142 | 143 | 144 | 145 | 146 | 147 | 148 | 149 | 150 |
| Sequence (SEQ ID NO: 4) | D | Y | R | K | R | V | Q | N | V | T |
| SEQ ID NO: 5 (mature) | 148 | 149 | 150 | 151 | 152 | 153 | 154 | 155 | 156 | 157 |
| SEQ ID NO: 4 (Zavialov) | 151 | 152 | 153 | 154 | 155 | 156 | 157 | 158 | 159 | 160 |
| Sequence (SEQ ID NO: 4) | E | F | D | D | S | L | L | R | N | F |
| SEQ ID NO: 5 (mature) | 158 | 159 | 160 | 161 | 162 | 163 | 164 | 165 | 166 | 167 |
| SEQ ID NO: 4 (Zavialov) | 161 | 162 | 163 | 164 | 165 | 166 | 167 | 168 | 169 | 170 |
| Sequence (SEQ ID NO: 4) | T | L | V | T | Q | H | P | E | V | I |
| SEQ ID NO: 5 (mature) | 168 | 169 | 170 | 171 | 172 | 173 | 174 | 175 | 176 | 177 |
| SEQ ID NO: 4 (Zavialov) | 171 | 172 | 173 | 174 | 175 | 176 | 177 | 178 | 179 | 180 |
| Sequence (SEQ ID NO: 4) | Y | T | N | Q | N | V | V | W | S | K |
| SEQ ID NO: 5 (mature) | 178 | 179 | 180 | 181 | 182 | 183 | 184 | 185 | 186 | 187 |
| SEQ ID NO: 4 (Zavialov) | 181 | 182 | 183 | 184 | 185 | 186 | 187 | 188 | 189 | 190 |
| Sequence (SEQ ID NO: 4) | F | E | T | I | F | F | T | I | S | G |
| SEQ ID NO: 5 (mature) | 188 | 189 | 190 | 191 | 192 | 193 | 194 | 195 | 196 | 197 |
| SEQ ID NO: 4 (Zavialov) | 191 | 192 | 193 | 194 | 195 | 196 | 197 | 198 | 199 | 200 |
| Sequence (SEQ ID NO: 4) | L | I | H | Y | A | P | V | F | R | D |
| SEQ ID NO: 5 (mature) | 198 | 199 | 200 | 201 | 202 | 203 | 204 | 205 | 206 | 207 |
| SEQ ID NO: 4 (Zavialov) | 201 | 202 | 203 | 204 | 205 | 206 | 207 | 208 | 209 | 210 |
| Sequence (SEQ ID NO: 4) | Y | V | F | R | S | M | Q | E | F | Y |
| SEQ ID NO: 5 (mature) | 208 | 209 | 210 | 211 | 212 | 213 | 214 | 215 | 216 | 217 |
| SEQ ID NO: 4 (Zavialov) | 211 | 212 | 213 | 214 | 215 | 216 | 217 | 218 | 219 | 220 |
| Sequence (SEQ ID NO: 4) | E | D | N | V | L | Y | M | E | I | R |
| SEQ ID NO: 5 (mature) | 218 | 219 | 220 | 221 | 222 | 223 | 224 | 225 | 226 | 227 |
| SEQ ID NO: 4 (Zavialov) | 221 | 222 | 223 | 224 | 225 | 226 | 227 | 228 | 229 | 230 |
| Sequence (SEQ ID NO: 4) | A | R | L | L | P | V | Y | E | L | S |
| SEQ ID NO: 5 (mature) | 228 | 229 | 230 | 231 | 232 | 233 | 234 | 235 | 236 | 237 |
| SEQ ID NO: 4 (Zavialov) | 231 | 232 | 233 | 234 | 235 | 236 | 237 | 238 | 239 | 240 |
| Sequence (SEQ ID NO: 4) | G | E | H | H | D | E | E | W | S | V |
| SEQ ID NO: 5 (mature) | 238 | 239 | 240 | 241 | 242 | 243 | 244 | 245 | 246 | 247 |
| SEQ ID NO: 4 (Zavialov) | 241 | 242 | 243 | 244 | 245 | 246 | 247 | 248 | 249 | 250 |
| Sequence (SEQ ID NO: 4) | K | T | Y | Q | E | V | A | Q | K | F |
| SEQ ID NO: 5 (mature) | 248 | 249 | 250 | 251 | 252 | 253 | 254 | 255 | 256 | 257 |
| SEQ ID NO: 4 (Zavialov) | 251 | 252 | 253 | 254 | 255 | 256 | 257 | 258 | 259 | 260 |
| Sequence (SEQ ID NO: 4) | V | E | T | H | P | E | F | I | G | I |
| SEQ ID NO: 5 (mature) | 258 | 259 | 260 | 261 | 262 | 263 | 264 | 265 | 266 | 267 |
| SEQ ID NO: 4 (Zavialov) | 261 | 262 | 263 | 264 | 265 | 266 | 267 | 268 | 269 | 270 |
| Sequence (SEQ ID NO: 4) | K | I | I | Y | S | D | H | R | S | K |
| SEQ ID NO: 5 (mature) | 268 | 269 | 270 | 271 | 272 | 273 | 274 | 275 | 276 | 277 |
| SEQ ID NO: 4 (Zavialov) | 271 | 272 | 273 | 274 | 275 | 276 | 277 | 278 | 279 | 280 |
| Sequence (SEQ ID NO: 4) | D | V | A | V | I | A | E | S | I | R |
| SEQ ID NO: 5 (mature) | 278 | 279 | 280 | 281 | 282 | 283 | 284 | 285 | 286 | 287 |
| SEQ ID NO: 4 (Zavialov) | 281 | 282 | 283 | 284 | 285 | 286 | 287 | 288 | 289 | 290 |
| Sequence (SEQ ID NO: 4) | M | A | M | G | L | R | I | K | F | P |
| SEQ ID NO: 5 (mature) | 288 | 289 | 290 | 291 | 292 | 293 | 294 | 295 | 296 | 297 |
| SEQ ID NO: 4 (Zavialov) | 291 | 292 | 293 | 294 | 295 | 296 | 297 | 298 | 299 | 300 |
| Sequence (SEQ ID NO: 4) | T | V | V | A | G | F | D | L | V | G |
| SEQ ID NO: 5 (mature) | 298 | 299 | 300 | 301 | 302 | 303 | 304 | 305 | 306 | 307 |
| SEQ ID NO: 4 (Zavialov) | 301 | 302 | 303 | 304 | 305 | 306 | 307 | 308 | 309 | 310 |
| Sequence (SEQ ID NO: 4) | H | E | D | T | G | H | S | L | H | D |
| SEQ ID NO: 5 (mature) | 308 | 309 | 310 | 311 | 312 | 313 | 314 | 315 | 316 | 317 |
| SEQ ID NO: 4 (Zavialov) | 311 | 312 | 313 | 314 | 315 | 316 | 317 | 318 | 319 | 320 |
| Sequence (SEQ ID NO: 4) | Y | K | E | A | L | M | I | P | A | K |
| SEQ ID NO: 5 (mature) | 318 | 319 | 320 | 321 | 322 | 323 | 324 | 325 | 326 | 327 |
| SEQ ID NO: 4 (Zavialov) | 321 | 322 | 323 | 324 | 325 | 326 | 327 | 328 | 329 | 330 |
| Sequence (SEQ ID NO: 4) | D | G | V | K | L | P | Y | F | F | H |
| SEQ ID NO: 5 (mature) | 328 | 329 | 330 | 331 | 332 | 333 | 334 | 335 | 336 | 337 |
| SEQ ID NO: 4 (Zavialov) | 331 | 332 | 333 | 334 | 335 | 336 | 337 | 338 | 339 | 340 |
| Sequence (SEQ ID NO: 4) | A | G | E | T | D | W | Q | G | T | S |
| SEQ ID NO: 5 (mature) | 338 | 339 | 340 | 341 | 342 | 343 | 344 | 345 | 346 | 347 |
| SEQ ID NO: 4 (Zavialov) | 341 | 342 | 343 | 344 | 345 | 346 | 347 | 348 | 349 | 350 |
| Sequence (SEQ ID NO: 4) | I | D | R | N | I | L | D | A | L | M |
| SEQ ID NO: 5 (mature) | 348 | 349 | 350 | 351 | 352 | 353 | 354 | 355 | 356 | 357 |
| SEQ ID NO: 4 (Zavialov) | 351 | 352 | 353 | 354 | 355 | 356 | 357 | 358 | 359 | 360 |
| Sequence (SEQ ID NO: 4) | L | N | T | T | R | I | G | H | G | F |
| SEQ ID NO: 5 (mature) | 358 | 359 | 360 | 361 | 362 | 363 | 364 | 365 | 366 | 367 |
| SEQ ID NO: 4 (Zavialov) | 361 | 362 | 363 | 364 | 365 | 366 | 367 | 368 | 369 | 370 |
| Sequence (SEQ ID NO: 4) | A | L | S | K | H | P | A | V | R | T |
| SEQ ID NO: 5 (mature) | 368 | 369 | 370 | 371 | 372 | 373 | 374 | 375 | 376 | 377 |
| SEQ ID NO: 4 (Zavialov) | 371 | 372 | 373 | 374 | 375 | 376 | 377 | 378 | 379 | 380 |
| Sequence (SEQ ID NO: 4) | Y | S | W | K | K | D | I | P | I | E |
| SEQ ID NO: 5 (mature) | 378 | 379 | 380 | 381 | 382 | 383 | 384 | 385 | 386 | 387 |
| SEQ ID NO: 4 (Zavialov) | 381 | 382 | 383 | 384 | 385 | 386 | 387 | 388 | 389 | 390 |
| Sequence (SEQ ID NO: 4) | V | C | P | I | S | N | Q | V | L | K |
| SEQ ID NO: 5 (mature) | 388 | 389 | 390 | 391 | 392 | 393 | 394 | 395 | 396 | 397 |
| SEQ ID NO: 4 (Zavialov) | 391 | 392 | 393 | 394 | 395 | 396 | 397 | 398 | 399 | 400 |
| Sequence (SEQ ID NO: 4) | L | V | S | D | L | R | N | H | P | V |
| SEQ ID NO: 5 (mature) | 398 | 399 | 400 | 401 | 402 | 403 | 404 | 405 | 406 | 407 |
| SEQ ID NO: 4 (Zavialov) | 401 | 402 | 403 | 404 | 405 | 406 | 407 | 408 | 409 | 410 |
| Sequence (SEQ ID NO: 4) | A | T | L | M | A | T | G | H | P | M |
| SEQ ID NO: 5 (mature) | 408 | 409 | 410 | 411 | 412 | 413 | 414 | 415 | 416 | 417 |
| SEQ ID NO: 4 (Zavialov) | 411 | 412 | 413 | 414 | 415 | 416 | 417 | 418 | 419 | 420 |
| Sequence (SEQ ID NO: 4) | V | I | S | S | D | D | P | A | M | F |
| SEQ ID NO: 5 (mature) | 418 | 419 | 420 | 421 | 422 | 423 | 424 | 425 | 426 | 427 |
| SEQ ID NO: 4 (Zavialov) | 421 | 422 | 423 | 424 | 425 | 426 | 427 | 428 | 429 | 430 |
| Sequence (SEQ ID NO: 4) | G | A | K | G | L | S | Y | D | F | Y |
| SEQ ID NO: 5 (mature) | 428 | 429 | 430 | 431 | 432 | 433 | 434 | 435 | 436 | 437 |
| SEQ ID NO: 4 (Zavialov) | 431 | 432 | 433 | 434 | 435 | 436 | 437 | 438 | 439 | 440 |
| Sequence (SEQ ID NO: 4) | E | V | F | M | G | I | G | G | M | K |
| SEQ ID NO: 5 (mature) | 438 | 439 | 440 | 441 | 442 | 443 | 444 | 445 | 446 | 447 |
| SEQ ID NO: 4 (Zavialov) | 441 | 442 | 443 | 444 | 445 | 446 | 447 | 448 | 449 | 450 |
| Sequence (SEQ ID NO: 4) | A | D | L | R | T | L | K | Q | L | A |
| SEQ ID NO: 5 (mature) | 448 | 449 | 450 | 451 | 452 | 453 | 454 | 455 | 456 | 457 |
| SEQ ID NO: 4 (Zavialov) | 451 | 452 | 453 | 454 | 455 | 456 | 457 | 458 | 459 | 460 |
| Sequence (SEQ ID NO: 4) | M | N | S | I | K | Y | S | T | L | L |
| SEQ ID NO: 5 (mature) | 458 | 459 | 460 | 461 | 462 | 463 | 464 | 465 | 466 | 467 |
| SEQ ID NO: 4 (Zavialov) | 461 | 462 | 463 | 464 | 465 | 466 | 467 | 468 | 469 | 470 |
| Sequence (SEQ ID NO: 4) | E | S | E | K | N | T | F | M | E | I |
| SEQ ID NO: 5 (mature) | 468 | 469 | 470 | 471 | 472 | 473 | 474 | 475 | 476 | 477 |
| SEQ ID NO: 4 (Zavialov) | 471 | 472 | 473 | 474 | 475 | 476 | 477 | 478 | 479 | 480 |
| Sequence (SEQ ID NO: 4) | W | K | K | R | W | D | K | F | I | A |
| SEQ ID NO: 5 (mature) | 478 | 479 | 480 | 481 | 482 | | | | | |
| SEQ ID NO: 4 (Zavialov) | 481 | 482 | 483 | 484 | 485 | | | | | |
| Sequence (SEQ ID NO: 4) | D | V | A | T | K | | | | | |

[0334] As used herein, a “conjugate” refers to a polypeptide linked directly or indirectly to one or more other polypeptides or chemical moieties. Such conjugates include fusion proteins, those produced by chemical conjugates and those produced by any other methods. For example, a conjugate refers to an ADA2 protein linked directly or indirectly to one or more other polypeptides or chemical moieties, whereby at least one ADA2 polypeptide subunit is linked, directly or indirectly to another polypeptide or chemical moiety so long as the conjugate retains adenosine deaminase activity.

[0335] As used herein, “coupled” or “conjugated” means attached via a covalent or noncovalent interaction.

[0336] As used herein, a chimeric polypeptide refers to a polypeptide that contains portions from at least two different polypeptides or from two non-contiguous portions of a single polypeptide. Thus, a chimeric polypeptide generally includes a sequence of amino acid residues from all or part of one polypeptide and a sequence of amino acids from all or part of another different polypeptide. The two portions can be linked directly or indirectly and can be linked via peptide bonds, other covalent bonds covalent interactions of sufficient strength to maintain the integrity of a substantial portion of the chimeric polypeptide under equilibrium conditions and physiologic conditions, such as in isotonic pH 7 buffered saline.

[0337] As used herein, a fusion protein is a polypeptide engineered to contain sequences of amino acids corresponding to two distinct polypeptides, which are joined together, such as by expressing the fusion protein from a vector containing two nucleic acids, encoding the two polypeptides, in close proximity, e.g., adjacent, to one another along the length of the vector. Accordingly, a fusion protein refers to a chimeric protein containing two, or portions from two, or more proteins or peptides that are linked directly or indirectly via peptide bonds. The two molecules can be adjacent in the construct or separated by a linker, or spacer polypeptide.

[0338] As used herein, “linker” or “spacer” peptide refers to short sequences of amino acids that join two polypeptide sequences (or nucleic acid encoding such an amino acid sequence). “Peptide linker” refers to the short sequence of amino acids joining the two polypeptide sequences. Exemplary of polypeptide linkers are linkers joining a peptide transduction domain to an antibody or linkers joining two antibody chains in a synthetic antibody fragment such as an scFv fragment. Linkers are well-known and any known linkers can be used in the provided methods. Exemplary of polypeptide linkers are (Gly-Ser)n amino acid sequences, with some Glu or Lys residues dispersed throughout to increase solubility. Other exemplary linkers are described herein; any of these and other known linkers can be used with the provided compositions and methods.

[0339] As used herein, a multimerization domain refers to a sequence of amino acids that promotes stable interaction of a polypeptide molecule with one or more additional polypeptide molecules, each containing a complementary multimerization domain, which can be the same or a different multimerization domain to form a stable multimer with the first domain. Generally, a polypeptide is joined directly or indirectly to the multimerization domain. Exemplary multimerization domains include the immunoglobulin sequences or portions thereof, leucine zippers, hydrophobic regions, hydrophilic regions, and compatible protein-protein interaction domains. The multimerization domain, for example, can be an immunoglobulin constant region or domain, such as, for example, the Fc domain or portions thereof from IgG, including IgG1, IgG2, IgG3 or IgG4 subtypes, IgA, IgE, IgD and IgM and modified forms thereof.

[0340] As used herein, a “moiety” or “heterologous moiety” refers to a molecule that is capable of associating with another molecule, either directly or indirectly by a covalent or non-covalent interaction. Typically, the molecule is derived from a distinct entity from that of the entity to which it is being associated. In one embodiment, a heterologous moiety can be a polypeptide fused to another polypeptide to produce a fusion polypeptide or protein. In another embodiment, a heterologous moiety can be a non-polypeptide such as a polymer, such as a PEG conjugated to a polypeptide or protein.

[0341] As used herein, a “half-life extending moiety” is heterologous moiety that facilitates the increased half-life of the molecule to which it is conjugated.

[0342] As used herein, “Fc” or “Fc region” or “Fc domain” refers to a polypeptide containing the constant region of an antibody heavy chain, excluding the first constant region immunoglobulin domain. Thus, Fc refers to the last two constant region immunoglobulin domains of IgA, IgD, and IgE, or the last three constant region immunoglobulin domains of IgE and IgM. Optionally, an Fc domain can include all or part of the flexible hinge N-terminal to these domains. For IgA and IgM, Fc can include the J chain. For an exemplary Fc domain of IgG, Fc contains immunoglobulin domains Cy2 and Cy3, and optionally, all or part of the hinge between Cy1 and Cy2. The boundaries of the Fc region can vary, but typically, include at least part of the hinge region. In addition, Fc also includes any allelic or species variant or any variant or modified form, such as any variant or modified form that alters the binding to an FcR or alters an Fc-mediated effector function.

[0343] As used herein, “Fc chimera” refers to a chimeric polypeptide in which one or more polypeptides is linked, directly or indirectly, to an Fc region or a derivative thereof. Typically, an Fc chimera combines the Fc region of an immunoglobulin with another polypeptide. Derivatives of or modified Fc polypeptides are known to those of skill in the art.

[0344] As used herein, a “polymer” refers to any high molecular weight natural or synthetic moiety that is conjugated to, i.e. stably linked directly or indirectly via a linker, to a polypeptide. Such polymers, typically increase serum half-life, and include, but are not limited to sialic moieties, PEGylation moieties, dextran, and sugar and other moieties, such as for glycosylation. For example, ADA2 proteins, such as a variant ADA2, can be conjugated to a polymer.

[0345] As used herein, “PEGylated” refers to covalent or other stable attachment of polymeric molecules, such as polyethylene glycol (PEGylation moiety PEG) to proteins, including an ADA2, such as a variant ADA2. PEGylation can increase half-life of the ADA2.

[0346] As used herein, nucleic acids include DNA, RNA and analogs thereof, including peptide nucleic acids (PNA) and mixtures thereof. Nucleic acids can be single or double-stranded. When referring to probes or primers, which are optionally labeled, such as with a detectable label, such as a fluorescent or radiolabel, single-stranded molecules are contemplated. Such molecules are typically of a length such that their target is statistically unique or of low copy number (typically less than 5, generally less than 3) for probing or priming a library. Generally a probe or primer contains at least 14, 16 or 30 contiguous nucleotides of sequence complementary to or identical to a gene of interest. Probes and primers can be 10, 20, 30, 50, 100 or more nucleotides long.

[0347] As used herein, a peptide refers to a polypeptide that is from 2 to 40 amino acids in length.

[0348] As used herein, the amino acids that occur in the various sequences of amino acids provided herein are identified according to their known, three-letter or one-letter abbreviations (Table 2). The nucleotides which occur in the various nucleic acid fragments are designated with the standard single-letter designations used routinely in the art.

[0349] As used herein, an “amino acid” is an organic compound containing an amino group and a carboxylic acid group. A polypeptide contains two or more amino acids. For purposes herein, amino acids include the twenty naturally-occurring amino acids, non-natural amino acids and amino acid analogs (i.e., amino acids wherein the α-carbon has a side chain).

[0350] In keeping with standard polypeptide nomenclature described in J. Biol. Chem., 243: 3557-3559 (1968), and adopted in 37 C.F.R. §§ 1.821-1.822, abbreviations for the amino acid residues are shown in Table 2:

TABLE 2
Table of Correspondence

| SYMBOL | | |
|---|---|---|
| 1-Letter | 3-Letter | AMINO ACID |
| Y | Tyr | Tyrosine |
| G | Gly | Glycine |
| F | Phe | Phenylalanine |
| M | Met | Methionine |
| A | Ala | Alanine |
| S | Ser | Serine |
| I | Ile | Isoleucine |
| L | Leu | Leucine |
| T | Thr | Threonine |
| V | Val | Valine |
| P | Pro | proline |
| K | Lys | Lysine |
| H | His | Histidine |
| Q | Gln | Glutamine |
| E | Glu | glutamic acid |
| Z | Glx | Glu and/or Gln |
| W | Trp | Tryptophan |
| R | Arg | Arginine |
| D | Asp | aspartic acid |
| N | Asn | asparagine |
| B | Asx | Asn and/or Asp |
| C | Cys | Cysteine |
| X | Xaa | Unknown or other |

[0351] All amino acid residue sequences represented herein by formulae have a left to right orientation in the conventional direction of amino-terminus to carboxyl-terminus. In addition, the phrase “amino acid residue” is broadly defined to include the amino acids listed in the Table of Correspondence (Table 2) and modified and unusual amino acids, such as those referred to in 37 C.F.R. §§ 1.821-1.822, and incorporated herein by reference. A dash at the beginning or end of an amino acid residue sequence indicates a peptide bond to a further sequence of one or more amino acid residues, to an amino-terminal group such as NH₂ or to a carboxyl-terminal group such as COOH.

[0352] As used herein, a “hydrophobic amino acid” includes any one of the amino acids determined to be hydrophobic using the Eisenberg hydrophobicity consensus scale. Exemplary are the naturally occurring hydrophobic amino acids, such as isoleucine, phenylalanine, valine, leucine, tryptophan, methionine, alanine, glycine, cysteine and tyrosine (Eisenberg et al., (1982) Faraday Symp. Chem. Soc. 17:109-120). Non-naturally-occurring hydrophobic amino acids also are included.

[0353] As used herein, an “acidic amino acid” includes among the naturally-occurring amino acids aspartic acid and glutamic acid residues. Non-naturally-occurring acidic amino acids also are included.

[0354] As used herein, a “polar amino acid” refers to an amino acid that is a hydrophile, such that the side chains prefer to reside in an aqueous (i.e. water) environment. Such amino acids generally are located on the surface of a protein. Such amino acids generally are classified if they include those with polar side chains that have a functional group such as an acid, amide, alcohol or amine that contains oxygens or nitrogens that can participate in hydrogen bonding with water. Exemplary of such amino acids are Arg (R), Asn (N), Asp (D), Glu (E), Gln (Q), His (H), Lys (K), Ser (S), Thr (T), and Tyr (Y). Cys (C) and Trp (W), which are also considered to be weakly polar.

[0355] As used herein, a polar and neutral amino acid is a polar amino acid that contains a neutral side chain. Exemplary of such amino acid residues for replacement are Asn (N), Gln (Q), Ser (S), Thr (T), Cys (C) or Tyr (Y).

[0356] As used herein, “naturally occurring amino acids” refer to the 20 L-amino acids that occur in polypeptides.

[0357] As used herein, “non-natural amino acid” refers to an organic compound containing an amino group and a carboxylic acid group that is not one of the naturally-occurring amino acids listed in Table 2. Non-naturally occurring amino acids thus include, for example, amino acids or analogs of amino acids other than the 20 naturally-occurring amino acids and include, but are not limited to, the D-stereoisomer of amino acids. Exemplary non-natural amino acids are known to those of skill in the art and can be included in a modified ADA2 polypeptide.

[0358] As used herein, suitable conservative substitutions of amino acids are known to those of skill in the art and can be made generally without altering the biological activity of the resulting molecule. Those of skill in the art recognize that, in general, single amino acid substitutions in non-essential regions of a polypeptide do not substantially alter biological activity (see, e.g., Watson et al. Molecular Biology of the Gene, 4th Edition, 1987, The Benjamin/Cummings Pub. co., p. 224). Such substitutions can be made in accordance with those set forth in Table 3 as follows:

TABLE 3

| | Exemplary |
|---|---|
| Original | conservative |
| residue | substitution |
| Ala (A) | Gly; Ser |
| Arg (R) | Lys |
| Asn (N) | Gln; His |
| Cys (C) | Ser |
| Gln (Q) | Asn |
| Glu (E) | Asp |
| Gly (G) | Ala; Pro |
| His (H) | Asn; Gln |
| Ile (I) | Leu; Val |
| Leu (L) | Ile; Val |
| Lys (K) | Arg; Gln; Glu |
| Met (M) | Leu; Tyr; Ile |
| Phe (F) | Met; Leu; Tyr |
| Ser (S) | Thr |
| Thr (T) | Ser |
| Trp (W) | Tyr |
| Tyr (Y) | Trp; Phe |
| Val (V) | Ile; Leu |

[0359] Other substitutions also are permissible and can be determined empirically or in accord with known conservative substitutions.

[0360] As used herein, a DNA construct is a single or double stranded, linear or circular DNA molecule that contains segments of DNA combined and juxtaposed in a manner not found in nature. DNA constructs exist as a result of human manipulation, and include clones and other copies of manipulated molecules.

[0361] As used herein, a DNA segment is a portion of a larger DNA molecule having specified attributes. For example, a DNA segment encoding a specified polypeptide is a portion of a longer DNA molecule, such as a plasmid or plasmid fragment, which, when read from the 5′ to 3′ direction, encodes the sequence of amino acids of the specified polypeptide.

[0362] As used herein, the term polynucleotide means a single- or double-stranded polymer of deoxyribonucleotides or ribonucleotide bases read from the 5′ to the 3′ end. Polynucleotides include RNA and DNA, and can be isolated from natural sources, synthesized in vitro, or prepared from a combination of natural and synthetic molecules. The length of a polynucleotide molecule is given herein in terms of nucleotides (abbreviated “nt”) or base pairs (abbreviated “bp”). The term nucleotides is used for single- and double-stranded molecules where the context permits. When the term is applied to double-stranded molecules it is used to denote overall length and will be understood to be equivalent to the term base pairs. It will be recognized by those skilled in the art that the two strands of a double-stranded polynucleotide can differ slightly in length and that the ends thereof can be staggered; thus all nucleotides within a double-stranded polynucleotide molecule cannot be paired. Such unpaired ends will, in general, not exceed 20 nucleotides in length.

[0363] As used herein, “primary sequence” refers to the sequence of amino acid residues in a polypeptide.

[0364] As used herein, “similarity” between two proteins or nucleic acids refers to the relatedness between the sequence of amino acids of the proteins or the nucleotide sequences of the nucleic acids. Similarity can be based on the degree of identity and/or homology of sequences of residues and the residues contained therein. Methods for assessing the degree of similarity between proteins or nucleic acids are known to those of skill in the art. For example, in one method of assessing sequence similarity, two amino acid or nucleotide sequences are aligned in a manner that yields a maximal level of identity between the sequences. “Identity” refers to the extent to which the amino acid or nucleotide sequences are invariant. Alignment of amino acid sequences, and to some extent nucleotide sequences, also can take into account conservative differences and/or frequent substitutions in amino acids (or nucleotides). Conservative differences are those that preserve the physico-chemical properties of the residues involved. Alignments can be global (alignment of the compared sequences over the entire length of the sequences and including all residues) or local (the alignment of a portion of the sequences that includes only the most similar region or regions).

[0365] As used herein, the terms “homology” and “identity” are used interchangeably, but homology for proteins can include conservative amino acid changes. In general to identify corresponding positions the sequences of amino acids are aligned so that the highest order match is obtained (see, e.g.: Computational Molecular Biology, Lesk, A. M., ed., Oxford University Press, New York, 1988; Biocomputing: Informatics and Genome Projects, Smith, D. W., ed., Academic Press, New York, 1993; Computer Analysis of Sequence Data, Part I, Griffin, A. M., and Griffin, H. G., eds., Humana Press, New Jersey, 1994; Sequence Analysis in Molecular Biology, von Heinje, G., Academic Press, 1987; and Sequence Analysis Primer, Gribskov, M. and Devereux, J., eds., M Stockton Press, New York, 1991; Carrillo et al. (1988) SIAM J Applied Math 48:1073).

[0366] As use herein, “sequence identity” refers to the number of identical amino acids (or nucleotide bases) in a comparison between a test and a reference polypeptide or polynucleotide. Homologous polypeptides refer to a pre-determined number of identical or homologous amino acid residues. Homology includes conservative amino acid substitutions as well as identical residues. Sequence identity can be determined by standard alignment algorithm programs used with default gap penalties established by each supplier. Homologous nucleic acid molecules refer to a pre-determined number of identical or homologous nucleotides. Homology includes substitutions that do not change the encoded amino acid (i.e., “silent substitutions”) as well identical residues. Substantially homologous nucleic acid molecules hybridize typically at moderate stringency or at high stringency all along the length of the nucleic acid or along at least about 70%, 80% or 90% of the full-length nucleic acid molecule of interest. Also contemplated are nucleic acid molecules that contain degenerate codons in place of codons in the hybridizing nucleic acid molecule. (For determination of homology of proteins, conservative amino acids can be aligned as well as identical amino acids; in this case, percentage of identity and percentage homology varies). Whether any two nucleic acid molecules have nucleotide sequences (or any two polypeptides have amino acid sequences) that are at least 80%, 85%, 90%, 95%, 96%, 97%, 98% or 99% “identical” can be determined using known computer algorithms such as the “FAST A” program, using for example, the default parameters as in Pearson et al. Proc. Natl. Acad. Sci. USA 85: 2444 (1988) (other programs include the GCG program package (Devereux, J., et al., Nucleic Acids Research 12(I): 387 (1984)), BLASTP, BLASTN, FASTA (Altschul, S. F., et al., J. Molec. Biol. 215:403 (1990); Guide to Huge Computers, Martin J. Bishop, ed., Academic Press, San Diego (1994), and Carrillo et al. SIAM J Applied Math 48: 1073 (1988)). For example, the BLAST function of the National Center for Biotechnology Information database can be used to determine identity. Other commercially or publicly available programs include DNAStar “MegAlign” program (Madison, Wis.) and the University of Wisconsin Genetics Computer Group (UWG) “Gap” program (Madison Wis.)). Percent homology or identity of proteins and/or nucleic acid molecules can be determined, for example, by comparing sequence information using a GAP computer program (e.g., Needleman et al. J. Mol. Biol. 48: 443 (1970), as revised by Smith and Waterman (Adv. Appl. Math. 2: 482 (1981)). Briefly, a GAP program defines similarity as the number of aligned symbols (i.e., nucleotides or amino acids) that are similar, divided by the total number of symbols in the shorter of the two sequences. Default parameters for the GAP program can include: (1) a unary comparison matrix (containing a value of 1 for identities and 0 for non identities) and the weighted comparison matrix of Gribskov et al. Nucl. Acids Res. 14: 6745 (1986), as described by Schwartz and Dayhoff, eds., Atlas of Protein Sequence and Structure, National Biomedical Research Foundation, pp. 353-358 (1979); (2) a penalty of 3.0 for each gap and an additional 0.10 penalty for each symbol in each gap; and (3) no penalty for end gaps.

[0367] Therefore, as used herein, the term “identity” represents a comparison between a test and a reference polypeptide or polynucleotide. In one non-limiting example, “at least 90% identical to” refers to percent identities from 90 to 100% relative to the reference polypeptides. Identity at a level of 90% or more is indicative of the fact that, assuming for exemplification purposes a test and reference polynucleotide length of 100 amino acids are compared, no more than 10% (i.e., 10 out of 100) of amino acids in the test polypeptide differs from that of the reference polypeptides. Similar comparisons can be made between a test and reference polynucleotides. Such differences can be represented as point mutations randomly distributed over the entire length of an amino acid sequence or they can be clustered in one or more locations of varying length up to the maximum allowable, e.g., 10/100 amino acid difference (approximately 90% identity). Differences are defined as nucleic acid or amino acid substitutions, insertions or deletions. At the level of homologies or identities above about 85-90%, the result should be independent of the program and gap parameters set; such high levels of identity can be assessed readily, often without relying on software.

[0368] As used herein, it also is understood that the terms “substantially identical” or “similar” varies with the context as understood by those skilled in the relevant art, but that those of skill can assess such.

[0369] As used herein, an aligned sequence refers to the use of homology (similarity and/or identity) to align corresponding positions in a sequence of nucleotides or amino acids. Typically, two or more sequences that are related by 50% or more identity are aligned. An aligned set of sequences refers to 2 or more sequences that are aligned at corresponding positions and can include aligning sequences derived from RNAs, such as ESTs and other cDNAs, aligned with genomic DNA sequence.

[0370] As used herein, “specifically hybridizes” refers to annealing, by complementary base-pairing, of a nucleic acid molecule (e.g. an oligonucleotide) to a target nucleic acid molecule. Those of skill in the art are familiar with in vitro and in vivo parameters that affect specific hybridization, such as length and composition of the particular molecule. Parameters particularly relevant to in vitro hybridization further include annealing and washing temperature, buffer composition and salt concentration. Exemplary washing conditions for removing non-specifically bound nucleic acid molecules at high stringency are 0.1×SSPE, 0.1% SDS, 65° C., and at medium stringency are 0.2×SSPE, 0.1% SDS, 50° C. Equivalent stringency conditions are known in the art. The skilled person can readily adjust these parameters to achieve specific hybridization of a nucleic acid molecule to a target nucleic acid molecule appropriate for a particular application.

[0371] As used herein, isolated or purified polypeptide or protein or biologically-active portion thereof is substantially free of cellular material or other contaminating proteins from the cell or tissue from which the protein is derived, or substantially free from chemical precursors or other chemicals when chemically synthesized. Preparations can be determined to be substantially free if they appear free of readily detectable impurities as determined by standard methods of analysis, such as thin layer chromatography (TLC), gel electrophoresis and high performance liquid chromatography (HPLC), used by those of skill in the art to assess such purity, or sufficiently pure such that further purification would not detectably alter the physical and chemical properties, such as enzymatic and biological activities, of the substance. Methods for purification of the compounds to produce substantially chemically pure compounds are known to those of skill in the art. A substantially chemically pure compound, however, can be a mixture of stereoisomers. In such instances, further purification might increase the specific activity of the compound.

[0372] Hence, reference to an isolated or purified protein or catalytically active protein thereof means that it is substantially free of cellular material or other contaminating proteins from the cell of tissue from which the protein is derived, or substantially free from chemical precursors or other chemicals when chemically synthesized. Preparations can be determined to be substantially free if they appear free of readily detectable impurities as determined by standard methods of analysis, such as thin layer chromatography (TLC), gel electrophoresis and high performance liquid chromatography (HPLC), used by those of skill in the art to assess such purity, or sufficiently pure such that further purification would not detectably alter the physical and chemical properties, such as proteolytic and biological activities, of the substance. Methods for purification of the proteins to produce substantially pure polypeptides are known to those of skill in the art.

[0373] The term substantially free of cellular material includes preparations of proteins in which the protein is separated from cellular components of the cells from which it is isolated or recombinantly-produced. In one embodiment, the term substantially free of cellular material includes preparations of protease proteins having less than about 30% (by dry weight) of non-protease proteins (also referred to herein as a contaminating protein), generally less than about 20% of non-protease proteins or 10% of non-protease proteins or less that about 5% of non-protease proteins. When the protease protein or active portion thereof is recombinantly produced, it also is substantially free of culture medium, i.e., culture medium represents less than, about, or equal to 20%, 10% or 5% of the volume of the protease protein preparation.

[0374] As used herein, the term substantially free of chemical precursors or other chemicals includes preparations of protease proteins in which the protein is separated from chemical precursors or other chemicals that are involved in the synthesis of the protein. The term includes preparations of protease proteins having less than about 30% (by dry weight), 20%, 10%, 5% or less of chemical precursors or non-protease chemicals or components.

[0375] As used herein, production by recombinant methods by using recombinant DNA methods refers to the use of the well-known methods of molecular biology for expressing proteins encoded by cloned DNA.

[0376] As used herein, vector (or plasmid) refers to discrete elements that are used to introduce heterologous nucleic acid into cells for either expression or replication thereof. The vectors typically remain episomal, but can be designed to effect integration of a gene or portion thereof into a chromosome of the genome. Also contemplated are vectors that are artificial chromosomes, such as bacterial artificial chromosomes, yeast artificial chromosomes and mammalian artificial chromosomes. Selection and use of such vehicles are well known to those of skill in the art.

[0377] As used herein, expression refers to the process by which nucleic acid is transcribed into mRNA and translated into peptides, polypeptides, or proteins. If the nucleic acid is derived from genomic DNA, expression can, if an appropriate eukaryotic host cell or organism is selected, include processing, such as splicing of the mRNA.

[0378] As used herein, an expression vector includes vectors capable of expressing DNA that is operatively linked with regulatory sequences, such as promoter regions, that are capable of effecting expression of such DNA fragments. Such additional segments can include promoter and terminator sequences, and optionally can include one or more origins of replication, one or more selectable markers, an enhancer, a polyadenylation signal, and the like. Expression vectors are generally derived from plasmid or viral DNA, or can contain elements of both. Thus, an expression vector refers to a recombinant DNA or RNA construct, such as a plasmid, a phage, recombinant virus or other vector that, upon introduction into an appropriate host cell, results in expression of the cloned DNA. Appropriate expression vectors are well known to those of skill in the art and include those that are replicable in eukaryotic cells and/or prokaryotic cells and those that remain episomal or those which integrate into the host cell genome.

[0379] As used herein, vector also includes “virus vectors” or “viral vectors.” Viral vectors are engineered viruses that are operatively linked to exogenous genes to transfer (as vehicles or shuttles) the exogenous genes into cells.

[0380] As used herein, “operably” or “operatively linked” when referring to DNA segments means that the segments are arranged so that they function in concert for their intended purposes, e.g., transcription initiates downstream of the promoter and upstream of any transcribed sequences. The promoter is usually the domain to which the transcriptional machinery binds to initiate transcription and proceeds through the coding segment to the terminator.

[0381] As used herein, a human protein is one encoded by a nucleic acid molecule, such as DNA, present in the genome of a human, including all allelic variants and conservative variations thereof. A variant or modification of a protein is a human protein if the modification is based on the wildtype or prominent sequence of a human protein.

[0382] As used herein, a “composition” refers to any mixture of two or more products or compounds. It can be a solution, a suspension, liquid, powder, a paste, aqueous, non-aqueous, or any combination thereof.

[0383] As used herein, “a combination” refers to any association between two or among more items or elements, for example, two or more items that can be used together. For example, a combination can include an ADA2 protein and another therapeutic agent. Such combinations can be packaged as kits.

[0384] As used herein, a kit is a packaged combination, optionally, including instructions for use of the combination and/or other reactions and components for such use.

[0385] As used herein, an “article of manufacture” is a product that is made and sold. As used throughout this application, the term is intended to encompass ADA2 proteins, for example variant ADA2 proteins contained in articles of packaging.

[0386] As used herein, direct administration refers to a composition that is administered without dilution.

[0387] As used herein, a single dosage formulation refers to a formulation for use only once.

[0388] Typically, a single dosage formulation is for direct administration.

[0389] As used herein, a multiple dosage formulation refers to a formulation for use in repeat administrations.

[0390] As used herein, when referencing dosage based on mg/kg of the subject, an average human subject is considered to have a mass of about 70 kg-75 kg, such as 70 kg and a body surface area (BSA) of 1.73 m².

[0391] As used herein, “disease or disorder” refers to a pathological condition in an organism resulting from cause or condition including, but not limited to, infections, acquired conditions, genetic conditions, and characterized by identifiable symptoms. Diseases and disorders of interest herein include any associated with aberrant or high adenosine levels.

[0392] As used herein, a tumor, also known as a neoplasm, is an abnormal mass of tissue that results when cells proliferate at an abnormally high rate. Tumors can show partial or total lack of structural organization and functional coordination with normal tissue. Tumors can be benign (not cancerous), or malignant (cancerous). As used herein, a tumor is intended to encompass hematopoietic tumors as well as solid tumors.

[0393] Malignant tumors can be broadly classified into three major types. Carcinomas are malignant tumors arising from epithelial structures (e.g. breast, prostate, lung, colon, pancreas). Sarcomas are malignant tumors that originate from connective tissues, or mesenchymal cells, such as muscle, cartilage, fat or bone. Leukemias and lymphomas are malignant tumors affecting hematopoietic structures (structures pertaining to the formation of blood cells) including components of the immune system. Other malignant tumors include, but are not limited to, tumors of the nervous system (e.g. neurofibromatomas), germ cell tumors, and blastic tumors.

[0394] As used herein, neoplastic disease refers to any disorder involving cancer, including tumor development, growth, metastasis and progression.

[0395] As used herein, cancer is a term for diseases caused by or characterized by any type of malignant tumor, including metastatic cancers, lymphatic tumors, and blood cancers. Exemplary cancers include, but are not limited to, cancers of the bladder, brain, breast, bone marrow, cervix, colon/rectum, kidney, liver, lung/bronchus, ovary, pancreas, prostate, skin, stomach, thyroid, or uterus.

[0396] As used herein, “intravenous administration” refers to delivery of a therapeutic directly into a vein.

[0397] As used herein, a control refers to a sample that is substantially identical to the test sample, except that it is not treated with a test parameter, or, if it is a plasma sample, it can be from a normal volunteer not affected with the condition of interest. A control also can be an internal control.

[0398] As used herein, normal levels or values can be defined in a variety of ways known to one of skill in the art. Typically, normal levels refer to the expression levels of a marker (e.g. adenosine, ADR or nucleosidase) across a healthy population. The normal levels (or reference levels) are based on measurements of healthy subjects, such as from a specified source (i.e., blood, serum, tissue, or other source). Often, a normal level will be specified as a “normal range”, which typically refers to the range of values of the median 95% of the healthy population. Reference value is used interchangeably herein with normal level but can be different from normal levels depending on the subjects or the source. Reference levels are typically dependent on the normal levels of a particular segment of the population. Thus, for purposes herein, a normal or reference level is a predetermined standard or control by which a test patient can be compared.

[0399] As used herein, elevated level refers to the any level of amount or expression of a marker above a recited or normal threshold.

[0400] As used herein, biological sample refers to any sample obtained from a living or viral source or other source of macromolecules and biomolecules, and includes any cell type or tissue of a subject from which nucleic acid or protein or other macromolecule can be obtained. The biological sample can be a sample obtained directly from a biological source or to sample that is processed. For example, isolated nucleic acids that are amplified constitute a biological sample. Biological samples include, but are not limited to, body fluids, such as blood, plasma, serum, cerebrospinal fluid, synovial fluid, urine and sweat, and tissue and organ samples from animals, including biopsied tumor samples.

[0401] As used herein, detection includes methods that permit visualization (by eye or equipment) of a protein or marker. A protein can be visualized using an antibody specific to the protein. Detection of a protein can also be facilitated by fusion of a protein with a tag including an epitope tag or label.

[0402] As used herein, “treating” a subject with a disease or condition means that the subject's symptoms are partially or totally alleviated, or remain static following treatment. Hence treatment encompasses prophylaxis, therapy and/or cure. Prophylaxis refers to prevention of a potential disease and/or a prevention of worsening of symptoms or progression of a disease.

[0403] As used herein, a pharmaceutically effective agent includes any therapeutic agent or bioactive agents, including, but not limited to, for example, chemotherapeutics, anesthetics, vasoconstrictors, dispersing agents, conventional therapeutic drugs, including small molecule drugs and therapeutic proteins.

[0404] As used herein, treatment means any manner in which the symptoms of a condition, disorder or disease or other indication, are ameliorated or otherwise beneficially altered.

[0405] As used herein, therapeutic effect means an effect resulting from treatment of a subject that alters, typically improves or ameliorates the symptoms of a disease or condition or that cures a disease or condition. A therapeutically effective amount refers to the amount of a composition, molecule or compound which results in a therapeutic effect following administration to a subject.

[0406] As used herein, amelioration of the symptoms of a particular disease or disorder by a treatment, such as by administration of a pharmaceutical composition or other therapeutic, refers to any lessening, whether permanent or temporary, lasting or transient, of the symptoms or, adverse effects of a condition, such as, for example, reduction of adverse effects associated with or that occur upon administration of an ADA2, such as a variant ADA2.

[0407] As used herein, prevention or prophylaxis refers to reduction in the risk of developing a disease or condition.

[0408] As used herein, a “therapeutically effective amount” or a “therapeutically effective dose” refers to the quantity of an agent, compound, material, or composition containing a compound that is at least sufficient to produce a therapeutic effect. Hence, it is the quantity necessary for preventing, curing, ameliorating, arresting or partially arresting a symptom of a disease or disorder.

[0409] As used herein, unit dose form refers to physically discrete units suitable for human and animal subjects and packaged individually as is known in the art.

[0410] As used herein, the term “subject” refers to an animal, including a mammal, such as a human being. The subject can include any animal, such as, but are not limited to primates including humans, gorillas and monkeys; rodents, such as mice and rats; fowl, such as chickens; ruminants, such as goats, cows, deer, sheep; pigs and other animals. Non-human animals exclude humans as the contemplated animal.

[0411] As used herein, a patient refers to a human subject exhibiting symptoms of a disease or disorder.

[0412] As used herein, about the same means within an amount that one of skill in the art would consider to be the same or to be within an acceptable range of error. For example, typically, for pharmaceutical compositions, within at least 1%, 2%, 3%, 4%, 5% or 10% is considered about the same. Such amount can vary depending upon the tolerance for variation in the particular composition by subjects.

[0413] As used herein, the singular forms “a,” “an” and “the” include plural referents unless the context clearly dictates otherwise. Thus, for example, reference to a compound comprising or containing “an extracellular domain” includes compounds with one or a plurality of extracellular domains.

[0414] As used herein, ranges and amounts can be expressed as “about” a particular value or range. About also includes the exact amount. Hence “about 5 bases” means “about 5 bases” and also “5 bases.” As used herein, “optional” or “optionally” means that the subsequently described event or circumstance does or does not occur, and that the description includes instances where said event or circumstance occurs and instances where it does not. For example, an optionally substituted group means that the group is unsubstituted or is substituted.

[0415] As used herein, the abbreviations for any protective groups, amino acids and other compounds, are, unless indicated otherwise, in accord with their common usage, recognized abbreviations, or the IUPAC-IUB Commission on Biochemical Nomenclature (see, (1972) Biochem. 11:1726).

### B. ADENOSINE DEAMINASE 2 (ADA2) AND MODULATION OF ADENOSINE-MEDIATED TUMOR IMMUNOSUPPRESSION

[0416] Provided herein are methods of treating diseases or conditions such as a cancer or a tumor by administering any Adenosine Deaminase 2 (ADA2) protein, including variants or conjugates thereof, to a subject. Extracellular adenosine is responsible for the regulation of critical biological processes, such as immunomodulation (Blay, J. (2012) Encyclopedia of Cancer pp. 49-52). In pathophysiological conditions such as the tumor microenvironment (TME), extracellular adenosine concentration rapidly increases in certain parts of the TME, generating an immunosuppressive niche that promotes tumor growth. ADA2 modulates adenosine levels in the extracellular environment, thereby affecting adenosine signaling and adenosine-dependent immunosuppression. ADA2 can decrease the extracellular adenosine levels by converting adenosine to inosine, to overcome the immunosuppressive effects in the TME. For example, as shown herein, administration of ADA2 can reverse the adenosine-dependent immunosuppression and can reduce tumor growth in vivo.

[0417] 1. Tumor Immunity and Immune Evasion

[0418] Cancerous cells contain tumor-specific antigens that are recognized by the immune system. In tumor immunity, the goal of the immune system is to attack and eradicate these cancerous cells through the actions of immune cells, including cytotoxic T cells, Natural Killer (NK) cells and macrophages. For example, CD4+ and CD8+ T cells can become activated upon recognition of antigenic peptides presented on antigen-presenting cells on major histocompatibility complex (MHC) class I or class II molecules, respectively. Activated CD8+ cells, or cytotoxic T cells, can kill tumor cells expressing the antigen, which can be helped by the presence of CD4+ T cells. In addition to the direct killing effects of cytotoxic T cells, T cells also produce various cytokines and chemokines that can recruit other effector immune cells, such as neutrophils, macrophages or NK cells to the tumor microenvironment. NK cells also can directly kill cancer cells.

[0419] Studies have demonstrated that the immune system can prevent tumor growth. For example, immunodeficient mice develop more cancers than wild-type mice (Dunn et al. (2004) Immunity, 21:137-48). Lymphocytes and IFN-gamma have been shown to collaborate to prevent the formation of carcinogen-induced sarcoma and spontaneous epithelial carcinomas (Shankaran et al. (2001) Nature, 410:1107-1111). Further, gene-targeted and lymphocyte subset-depleted mice have demonstrated a role for NK cells in tumor rejection. For example, mice depleted for both NK and NK1.1+ T cells were found to have increased susceptibility to tumor formation compared to control mice, and a similar result was observed upon treatment of mice with antisialo-GM1, which selectively eliminates NK cells (Smyth et al. (2001) Int Immunol., 13; 459-63). In addition, the number, type and location of tumor immune infiltrates in primary tumors are prognostic factors for survival of cancer in human patients (Pages et al. (2005) N Engl J Med, 353:2654-2666).

[0420] Most tumors, however, can evade the immune system. The tumor microenvironment is complex, and includes a variety of immunosuppressive mechanisms that can be intrinsic to tumor cells or mediated by other cells or molecules. Through these mechanisms, alone or in combination, the immune system can promote tumor progression. These mechanisms include, but are not limited to, eliminating tumor cell antigens that elicit immune response; preventing or downregulating the expression of ligands required for immune activation, such as major histocompatibility complex class I (MHC I); production of immunosuppressive mediators, such as interleukin-10 (IL-10), transforming growth factor-O or adenosine; recruitment of immune cell subsets that suppress effector immune cell function, such as T regulatory cells (Tregs) or myeloid-derived suppressor cell (MDSC); or the upregulation of checkpoint inhibitors, such as cytotoxic T-lymphocyte antigen 4 (CTLA4), that can attenuate effector T-cell function. For example, adenosine is a prominent immunosuppressive agent in the tumor microenvironment.

[0421] 2. Adenosine Immunomodulation in Cancer and Tumor Microenvironment (TME)

[0422] Adenosine (adenine-9-p-D-ribofuranoside; Ado) is a nucleoside that exists as a part of adenine nucleotides (AMP, ADP, and ATP) which participate widely in cellular energy metabolism and act as precursor molecules in many processes. Adenosine can exist in the free form both inside and outside of cells.

[0423] Adenosine is an important in vivo signaling molecule, especially for the immune system. In particular, adenosine is a well-known effector of immune function. In T-cells, adenosine decreases T-cell receptor induced activation of NF-κB, and inhibits IL-2, IL-4, and IFN-γ. Adenosine decreases T-cell cytotoxicity, increases T-cell anergy, and increases T-cell differentiation to Foxp3⁺ or Lag-3⁺ regulatory T cells. Adenosine decreases IFN-γ production by NK cells and suppresses NK cell cytotoxicity. Adenosine blocks neutrophil adhesion and extravasation, decreases phagocytosis, and attenuates levels of superoxide and nitric oxide. Adenosine also decreases the expression of TNF-α, IL-12, and MIP-1α on macrophages, attenuates MHC Class II expression, and increases levels of IL-10 and IL-6. In addition, adenosine decreases phagocytosis and superoxide and nitric oxide levels on macrophages (Stagg and Smyth (2010) Oncogene 29:5346-5358).

[0424] FIG. 2 sets forth the biosynthesis and catabolism of adenosine. Extracellular adenosine is produced by the sequential activities of membrane associated ectoenzymes, CD39 and CD73, which together produce adenosine by phosphohydrolysis of ATP or ADP produced from dead or dying cells. CD39 (also called ectonucleoside triphosphate diphosphohydrolase; SEQ ID NO:542) converts extracellular ATP (or ADP) to 5′AMP. Then, CD73 (also called 5′nucleotidase; SEQ ID NO:543) converts 5′AMP to adenosine. The activity of CD39 is reversible by the actions of NDP kinase and adenylate kinase, whereas the activity of CD73 is irreversible. CD39 and CD73 are expressed on tumor stromal cells, including endothelial cells and Tregs, and also on many cancer cells. For example, the expression of CD39 and CD73 on endothelial cells is increased under the hypoxic conditions of the tumor microenvironment. Tumor hypoxia can result from inadequate blood supply and disorganized tumor vasculature, impairing delivery of oxygen (Carroll and Ashcroft (2005), Expert. Rev. Mol. Med. 7(6):1-16). Hypoxia also inhibits adenylate kinase (AK), which converts adenosine to AMP, leading to very high extracellular adenosine concentration. Thus, adenosine is released at high concentrations in response to hypoxia, which is a condition that frequently occurs the tumor microenvironment (TME), in or around solid tumors.

[0425] Thus, while the concentration of adenosine is typically low in the tissues and blood, the local adenosine concentration can increase significantly as a result of damage or stress, e.g., inflammation, ischemia, and hypoxia. For example, the extracellular concentration of adenosine in the hypoxic tumor microenvironment can be up to 10 μM adenosine, which is up to about 100-fold higher than the typical extracellular adenosine concentration of approximately 0.1 μM (Antonioli et al. (2013) Nat Rev Can 13:842-857). Since the hypoxic regions in tumors are centered around the microvessels, the local concentration of adenosine in regions of the tumor can actually be higher.

[0426] Adenosine immunomodulation activity occurs after its release into the extracellular space of the tumor and activation of adenosine receptors (ADRs) on the surface of target immune cells, cancer cells or endothelial cells. There are four types of ADRs, A₁ (SEQ ID NO:533), A_{2A}(SEQ ID NO:534), A_{2B} (SEQ ID NO:535) and A₃ (SEQ ID NOS:536-538), which are each G-protein coupled receptors with different affinity for adenosine and different downstream signaling pathways. Activation of the A₁ and A₃ receptors decrease intracellular cyclic AMP (cAMP) levels, and the activation of A_{2A} and A_{2B} receptors increase cAMP levels through the activation of adenylyl cyclase. Each of the A₁, A_{2A}, and A₃ can be activated at physiological concentrations of adenosine (e.g. 30-300 nM), but A_{2B} has a lower affinity for adenosine and requires higher levels of adenosine for activation (Stagg et al. (2010) Oncogene, 29:5346-5358). The result of activation of the ADRs differs depending on the cell type and the receptor type: it can lead to activation or suppression of cell function and cell death (Antonioli et al. (2013) Nat Rev Can 13:842-857). All four types of receptors can exist on cells in the tumor microenvironment, including on cancer cells, stromal cells, endothelial cells, and inflammatory and immune cells, and all can be activated at adenosine concentrations present in the tumor microenvironment.

[0427] The high adenosine levels in the tumor microenvironment results in local immunosuppression, which limits the capacity of the immune system to eliminate cancer cells. For example, adenosine can suppress various functions of T lymphocytes, natural killer (NK) cells, polymorphonuclear granulocytes, and phagocytic cells such as tissue macrophages. In particular, the A_{2A} receptor is known to be expressed on monocytes, macrophages, mast cells, granulocytes, lymphocytes, dendritic cells (DCs), NK cells and endothelial cells, and its expression on many cell types is induced by hypoxia (Stagg and Smyth (2010) Oncogene, 29:5346-5358). Activation of A_{2A} has been shown to suppress NK cell functions, inhibit T-cell proliferation, inhibit T cell cytotoxicity and cytokine production, and inhibit macrophage activation (Stagg and Smyth (2010); Antonioli et al. (2013)). Activation of A_{2B} has been shown to suppress DC differentiation to limit T cell activation and to promote expansion and accumulation of MSDC (Stagg and Smyth (2010); Antonioli et al. (2013)).

[0428] In addition to direct effects to inhibit the immune system, adenosine also can control cancer cell growth and dissemination by effects on cancer cell proliferation, apoptosis and angiogenesis. For example, adenosine can promote angiogenesis, primarily through the stimulation of A_{2A} and A_{2B} receptors. Stimulation of the receptors on endothelial cells can regulate the expression of intercellular adhesion molecule 1 (ICAM-1) and E-selectin on endothelial cells, maintain vascular integrity, and promote vessel growth (Antonioli et al. (2013)). In addition, activation of one or more of A_{2A}, A_{2B} or A₃ on various cells by adenosine can stimulate the production of the pro-angiogenic factors, such as vascular endothelial growth factor (VEGF), interleukin-8 (IL-8) or angiopoietin 2 (Antonioli et al. (2013)).

[0429] Adenosine also can directly regulate tumor cell proliferation, apoptosis and metastasis through interaction with receptors on cancer cells. For example, studies have shown that the activation of A₁ and A_{2A} receptors promote tumor cell proliferation in some breast cancer cell lines, and activation of A_{2B} receptors have cancer growth-promoting properties in colonic carcinoma cells (Antonioli et al. (2013)). Adenosine also can trigger apoptosis of cancer cells, and various studies have correlated this activity to activation of the extrinsic apoptotic pathway through A₃ or the intrinsic apoptotic pathway through A_{2A} and A_{2B} (Antonioli et al. (2013)). In addition, adenosine can promote tumor cell migration and metastasis, by increasing cell motility, adhesion to the extracellular matrix, and expression of cell attachment proteins and receptors to promote cell movement motility.

[0430] 3. Adenosine Deaminase and Targeting Adenosine in Treatment of Cancer

[0431] The levels of adenosine can be regulated by the actions of adenosine deaminase (ADA), which is an enzyme that converts adenosine to inosine or 2′-deoxyadenosine to 2′-deoxyinosine. In particular, ADA converts either adenosine or deoxyadenosine, in the presence or water, into inosine or deoxyinosine and ammonia as follows: adenosine+H₂O=inosine+NH₃ or 2′-deoxyadenosine+H₂O=2′-deoxyinosine+NH₃. The increase in ammonia in the local tumor microenvironment can increase the pH.

[0432] There are two types of ADA in humans, ADA1 and ADA2. ADA1 is ubiquitously present inside cells, and exhibits a similar binding affinity for adenosine and 2′deoxyadenosine with a Km of about 5.2×10⁻⁵ M. ADA1 principally functions intracellularly, to reduce the levels of adenosine that can be toxic to cells, such as lymphocytes. For example, deficiency of adenosine deaminase 1 (ADA1) is associated with mild immunodeficiency to severe combined immunodeficiency (SCID), due to the toxic accumulation of adenosine in immature lymphoid cells, thereby resulting in apoptotic death of lymphocytes and a profound depletion of T, B, and NK cells (Hershfield, M. S. (2005) Eur. J. Immunol. 35:25-30). In contrast, ADA2 contains a secretion signal sequence, and is the predominant extracellular ADA. The majority of ADA activity in normal human serum or plasma are from ADA2 (Neidzwicki and Aberneth (1991) Biochemical Pharmacology 41:1615-1624). ADA2 has a much lower binding affinity for adenosine with a Km of about 200×10⁻⁵ M, and exhibits even weaker affinity for 2′deoxyadenosine. Also, unlike ADA1, ADA2 has an acidic pH optimum.

[0433] Decreasing the tumor-specific accumulation of adenosine in the TME is an attractive therapeutic option for treating tumors and cancers. It is found herein that recombinant forms of ADA2 can be administered to a subject to selectively target the TME, where it can decrease the extracellular adenosine levels by deaminating adenosine to inosine, thereby reversing the immunosuppressive effect of adenosine. In particular, ADA2 is an extracellular adenosine deaminase adapted for high adenosine concentrations. As discussed above, adenosine is actively produced in the TME, and regions of the TME can have up to about a 100-fold higher adenosine concentration than other tissue environments. Because of the hydrophobic subpocket for substrate binding, discussed further below, the Kₘ of ADA2 for adenosine is approximately 100 times higher than that of ADA1. The turnover rate (k_{cat}), however, is similar to that of ADA1. Because ADA2 has a similar turnover rate but a lower affinity to adenosine, it can be specifically active in environments with high adenosine concentrations, such as the TME or site of inflammation, without affecting adenosine metabolism in normal microenvironments that have lower adenosine concentrations.

[0434] The results herein demonstrate that recombinant ADA2 is selectively targeted to the tumor environment. In addition, results provided herein confirm that adenosine-mediates immunosuppression in T cells and NK cells, and that this suppression can be reversed by administered adenosine deaminase 2 (ADA2). The selective activity of ADA2 for decreasing adenosine levels in the TME can limit undesired or unwanted side effects, which can occur if the activity of ADA2 were more ubiquitous. For example, many existing tumor therapeutics are limited because they can result in adverse side effects in the subject due to lack of specificity or selectivity. The use of ADA2, or variants or conjugates thereof, in methods provided herein can result in fewer or lesser undesirable side-effects and/or exhibit improved efficacy by virtue of the ability to dose higher.

[0435] Thus, ADA2 offers advantages compared to ADA1. In addition to differences in binding affinity for adenosine that permits the use of ADA2 as a selective tumor-targeting molecule, ADA1 also is not adapted for use in an extracellular environment. For example, ADA1 is primarily intracellular in vivo and is substantially less stable in the extracellular environment, such as in the plasma, as shown in the results provided herein. In contrast, ADA2 shows increased stability in the extracellular environment due to the extensive glycosylation that protect the molecule from proteolysis in the extracellular environment and conserved disulfide bonds. ADA2 also is substantially more stable at higher temperature compared to ADA1 (Daddona and Kelley (1981) Biochim. Biophys. Acta 658:280-290). It is found herein that ADA2 has a higher thermal stability, and that ADA2 is also more stable than ADA1 in extracellular environments, such as the plasma.

[0436] ADA2 also shows optimal activity in environments commonly found in the TME, such as environments having an acidic pH. For example, the optimal pH of wildtype ADA2 is approximately pH 6.5, whereas it is pH 7.5 for ADA1. The TME is a complex microenvironment in and surrounding the tumor that is made of diverse cell types and extracellular conditions. The TME commonly has regions where the extracellular environment is acidic, caused by lactic acid and other acidic metabolites produced by anaerobic glycolysis in hypoxic conditions of the tumor (Kato et al. (2013) Cancer Cell International 13:89).

[0437] In addition, ADA2 also overcomes other problems encountered with existing therapeutics, including those that target adenosine. For example, since adenosine has multiple receptors, it is difficult to target adenosine using an anti-ADR antibody, since all four ADR receptors are present in the TME and can be activated by adenosine. Hence, targeting of a single receptor would not achieve complete attenuation of adenosine immunomodulation activity.

[0438] Thus, the methods provided include methods of treatment using any ADA2, for example recombinant human ADA2 (rHuADA2) or variants and/or conjugates thereof, for treatment of diseases or conditions, such as a cancer or a tumor and other diseases or conditions involving aberrant or accumulated production of adenosine. Also provided herein are ADA2 variants and modified forms that possess altered properties, such as decreased heparin binding, increased catalytic efficiency, increased stability, altered glycosylation state and/or altered pH optimum. Any of the ADA2 proteins can be used in the methods of treatment provided herein. Also provided herein are methods of combination therapy using any ADA2 and other immunomodulatory agents, chemotherapeutic agents, immune checkpoint inhibitors or hyaluronan-degrading enzyme, such as a soluble hyaluronidase or polymer-conjugated soluble hyaluronidase (e.g. PEGPH20).

### C. ADENOSINE DEAMINASE 2 (ADA2) AND VARIANTS THEREOF

[0439] Provided herein are methods of treatment using an adenosine deaminase 2 (ADA2), including wildtype human ADA2, ADA2 variants and/or conjugates or other modified forms thereof. Also provided herein are variants of ADA2 with altered properties. ADA2 can be used to regulate adenosine levels in environments where regulation of adenosine-dependent immunomodulation or other adenosine-dependent activity is needed, such as in a tumor microenvironment or for inflammation.

[0440] 1. Structure and Activity of ADA2

[0441] Adenosine deaminases are enzymes that convert adenosine to inosine. There are three known ADAs: ADA1, ADA2 and ADA3, although the activity of ADA3 is not known. With respect to proteins with known adenosine deaminase activity, humans have both ADA2 and ADA1, whereas in flies, homologues of ADA2 (known as ADGF homologues) are the only active adenosine deaminase enzymes, and rodents only have ADA1, indicating that the two proteins have overlapping yet also distinct functions. Distinct functions relate to the difference in expression, cellular location and kinetic properties of the enzymatic activity, difference in other structural features, as well as the additional growth factor and heparin binding properties (Zavialov et al. (2010) J. Biol. Chem. 285:12367-12377).

[0442] ADA1 and ADA2 are structurally similar, and exhibit a shared catalytic mechanism to convert adenosine to inosine, but exhibit little sequence similarity. ADA2 has a nucleotide sequence set forth in SEQ ID NO: 1, which encodes a 511 amino acid protein, set forth in SEQ ID NO:2, that contains a signal sequence (corresponding to amino acid residues 1-29 of SEQ ID NO:2). Mature ADA2 is a secreted protein that lacks the signal sequence and has the sequence of amino acids set forth in SEQ ID NO:5. ADA1 has a nucleotide sequence set forth in SEQ ID NO: 11, which encodes a 363 amino acid protein that does not contain a signal sequence, and has the sequence of amino acids set forth in SEQ ID NO: 12. The N-terminal methionine residue is cleaved, resulting in the mature 362 amino acid protein, set forth in SEQ ID NO:66.

[0443] As discussed in more detail below, compared to ADA1, ADA2 is considerably longer and includes an 80-100-amino acid extension at the N terminus that is involved in dimerization and glycosaminoglycan (e.g. heparin) binding (Maier et al. (2005) Mol Evol 61:776-794). ADA2 also has an additional putative receptor binding (PRB) domain that is reported to mediate binding to cell surface receptors and/or contribute to its growth factor or other signaling functions. Also, unlike ADA1, ADA2 is dimeric and secreted, whereas ADA1 is monomeric and largely intracellular. ADA2 also is extensively glycosylated and has a conserved disulfide bond. The structural and functional features of ADA2 offer advantages as a therapeutic molecule, including, but not limited to, greater stability and increased tumor selectivity.

[0444] a. Structure of ADA2

[0445] ADA2, also known as dendritic cell derived growth factor (DCDGF) or adenosine deaminase growth factor (ADGF), is a member of the adenosine ADGF family of proteins. ADA2 is found only in eukaryotes, and primarily in multicellular organisms. In contrast, ADA1 is found in both prokaryotes and eukaryotes. In particular ADA2/ADGF homologs, have been characterized in insects and other vertebrates such as Xenopus laevis, as well as in humans. ADGF family proteins in insects were initially identified as proteins having growth factor activity, and later found to also possess adenosine deaminase activity.

[0446] In humans, ADA2 is encoded by the cat eye syndrome critical region gene 1 (CECR1) gene (Riazi et al. (2000) Genomics 64:277-285). The human CECR1 gene (nucleotide sequence of the coding region set forth in SEQ ID NO: 1) encodes a 511 amino acid precursor protein (sequence set forth in SEQ ID NO:2; Uniprot Accession No. Q9NZK5). ADA2 has an N-terminal 29 residue signal sequence (amino acid residues positions 1-29 of SEQ ID NO:2) that is cleaved following transport to the ER to form the 482 amino acid mature protein (sequence set forth in SEQ ID NO:5). The mature ADA2 protein exists as a homodimer due to nonpolar interactions between two polypeptide chains. Other sequences of human ADA2 also have been reported, see e.g. U.S. Pat. No. 5,968,780 (precursor form SEQ ID NO:376 and mature form SEQ ID NO:380), NCBI Acc. No. BAG369969.1 (precursor form SEQ ID NO:377 and mature form SEQ ID NO:381); NCBI Acc. No. AAF65941 (precursor form SEQ ID NO:378 and mature form SEQ ID NO:382); and NCBI Acc. No. AAH51755 (precursor form SEQ ID NO:379 and mature form SEQ ID NO:383). A non-canonical second isoform, formed by alternative splicing of the mRNA, encodes a shorter protein of 270 amino acids (sequence set forth in SEQ ID NO:68; Uniprot Accession No. Q9NZK5-2), missing the N-terminal 241 amino acids and containing a 10-amino acid sequence in the N-terminus that is different from the canonical isoform.

[0447] Exemplary ADA2 homologs in other species include, but are not limited to, ADA2 from Pan troglodytes (chimpanzee; precursor form SEQ ID NO:286, mature form SEQ ID NO:326; NCBI Acc. No. XP_003317127.1); Gorilla gorilla (gorilla; precursor form SEQ ID NO:287, mature form SEQ ID NO:327; NCBI Acc. No. XP_004063024.1); Pan paniscus (pygmy chimpanzee; precursor form SEQ ID NO:288, mature form SEQ ID NO:328; NCBI Acc. No. XP_003828345.1); Pongo abelii (Sumatran orangutan; precursor form SEQ ID NO:289, mature form SEQ ID NO:329; NCBI Acc. No. NP_001125360.1); Nomascus leucogenys (Northern white-cheeked gibbon; precursor form SEQ ID NO:290, mature form SEQ ID NO:330; NCBI Acc. No. XP_004088517.1); Macaca fascicularis (crab-eating macaque; precursor form SEQ ID NO:291, mature form SEQ ID NO:331; NCBI Acc. No. XP_005568111.1); Chlorocebus sabaeus (green monkey; precursor form SEQ ID NO:292, mature form SEQ ID NO:332; NCBI Acc. No. XP_007972990.1); Macaca mulatta (Rhesus macaque; precursor form SEQ ID NOS:293, 337, mature form SEQ ID NOS:333, 340; GenBank Acc. Nos. AFH32795.1, EHH20002.1); Callithrix jacchus (marmoset; precursor form SEQ ID NOS:294, 374, mature form SEQ ID NO:334, 375; NCBI Acc. No. XP_009004591.1, XP_009004586.1); Xenopus laevis (African clawed frog; precursor form SEQ ID NO:295, mature form SEQ ID NO:335; NCBI Acc. No. NP_001090531.1); Drosophila melanogaster (fruit fly; precursor form SEQ ID NOS:296-300, mature form SEQ ID NOS:336, 338, 339; AAL40913.1, AAL40920.1, AAL40911.1, AAL40912.1, and AAL40910.1); Bombyx mori (silk moth; precursor form SEQ ID NO:301, mature form SEQ ID NO:341; NCBI Acc. No. NP_001098698.1); and Sarcophaga perigrina (flesh fly; precursor form SEQ ID NO:302, mature form SEQ ID NO:342; GenBank Acc. No. BAA11812.1).

[0448] The domain organization of ADA2 is described in Zavialov et al. (2010) J. Biol. Chem. 285:12367-12377. ADA2 contains a core ADA domain or catalytic domain that makes up more than 70% of the amino acid sequence, and is structurally similar to the ADA domain in ADA1. In the monomer, the ADA domain is folded into eight strands of parallel α/β barrels, which surround a central deep pocket that is the active site. In addition, the ADA domain also contains three additional helices located between the β1 strand and the α1 helix (designated H1, H2 and H3) and two additional helices at the C terminus (designated H4 and H5). The ADA domain is contained in the region corresponding to residues 106-502 of the precursor ADA2 set forth in SEQ ID NO:2 (corresponding to residues 77-473 of the mature ADA2 set forth in SEQ ID NO:5). In the ADA region, ADA2 contains insertions of amino acid residues compared to ADA1, including residues that make up the putative receptor-binding (PRB) domain (discussed below), and which are not involved in the catalytic function of ADA2. The ADA domain does not have high sequence homology with that of ADA1 (18-210% identical residues), but the two ADA domains have high structural similarity. Table 4 summarizes the residues in the active site involved in substrate binding and catalysis.

TABLE 4

| Residue | |
|---|---|
| (numbering | |
| of precursor | |
| set forth in | |
| SEQ ID | |
| NO: 2) | Active Site |
| 112 | Zn²⁺ coordination, catalytic |
| 114 | Zn²⁺ coordination, catalytic |
| 115 | substrate binding |
| 116 | substrate binding |
| 204 | substrate binding |
| 207 | substrate binding |
| 208 | substrate binding |
| 211 | substrate binding |
| 293 | substrate binding |
| 325 | substrate binding |
| 326 | substrate binding |
| 356 | Zn²⁺ coordination, catalytic |
| 359 | active site proton donor, |
| | substrate binding |
| 384 | active site proton acceptor, |
| | substrate binding |
| 415 | substrate binding |
| 441 | Zn²⁺ coordination, catalytic, |
| | substrate binding |
| 442 | substrate binding |

[0449] Based on the crystal structure as reported in Zavialov et al. (2010) J. Biol. Chem. 285:12367-12377 of ADA2 with coformycin (CF), a transition state inhibitor that mimics the tetrahedral intermediate at the C6 position of adenine, residues involved in substrate binding have been identified. These include residues D115, I116, W204, F207, E208, F211, H293, V325, G326, E359, H384, L415, D441, and D442 of precursor ADA2 set forth in SEQ ID NO:2 (corresponding to residues D86, 187, W175, F178, E179, F182, H254, V296, G297, E330, H355, L386, D412 and D413 of mature ADA2 set forth in SEQ ID NO:5). Although the structural features of the catalytic site are similar between ADA2 and ADA1, the hydrophobic substrate-binding subpocket in the ADA domain of ADA2 is more open and contains fewer hydrophobic residues. These differences could account for the lower affinity of ADA2 for adenosine.

[0450] ADA2 is a zinc-dependent hydrolase that requires coordination with a bound zinc for activity, which acts as a powerful electrophile activating the attacking water to a hydroxide ion. Amino acid residues H112, H114, H356 and D441 of precursor ADA2 set forth in SEQ ID NO:2 (corresponding to H83, H85, H327, D412 of mature ADA2 set forth in SEQ ID NO:5) are involved in coordinating the zinc active center. During catalysis, the Zn⁺⁺ promotes nucleophilic attack on the carbonyl carbon by the oxygen atom of a water molecule at the active site. The combination of E359, H384 and D441 of precursor ADA2 set forth in SEQ ID NO:2 (corresponding to E330, H355 and D412 of mature ADA2 set forth in SEQ ID NO:5) participate as zinc ligands. H384 and D441 position the attacking water, E359 is the active site catalytic proton donor residue that facilitates the reaction by extracting a proton from the attacking water molecule, and H384 serves as the proton acceptor. The catalytic active site residues structurally mirror the corresponding active site residues of ADA1, indicating that the catalytic mechanism is similar between the two adenosine deaminases (Zavialov et al. (2010) J. Biol. Chem. 285:12367-12377).

[0451] Active ADA2 exists as a homodimer. Dimerization of ADA2 is mediated by residues in the N-terminal α-helices of ADA2 designated HN1, HN2, HN3 and HN4 (corresponding to residues 29-105 of precursor ADA2 set forth in SEQ ID NO:2, or residues 1-76 of mature ADA2 set forth in SEQ ID NO:5), as well as residues in the C-terminal α-helix designated H5 (corresponding to residues 503-511 of precursor ADA2 set forth in SEQ ID NO:2 or residues 474-482 of mature ADA2 set forth in SEQ ID NO:5). Because these regions are responsible for more than 70% of the nonpolar intersubunit interaction, they are designated the dimerization domain. The first N-terminal helix, HN1, forms a helix anchor due to ionic interactions between residues R34 and E41 (residues R5 and E12 of mature ADA2 set forth in SEQ ID NO:5) with D373 and H391 (residues D344 and H362 of mature ADA2 set forth in SEQ ID NO:5) of the neighboring subunit, and hydrophobic interactions between residues I30, T33, L37, L38, K40 and M44 (residues I1, T4, L8, L9, K11 and M15 of mature ADA2 set forth in SEQ ID NO:5) with residues in the neighboring subunit. A hydrophobic binding pocket is formed with residues M71, A74, M75, L78 and F80, which accommodates the W336 (residues M42, A45, M46, L49 and F51 of mature ADA2 set forth in SEQ ID NO:5) residue from the neighboring subunit.

[0452] ADA1, which does not form a dimer, does not contain the residues that make up the “dimerization domain.” Also, compared to ADA1, residue W336 in ADA2 is inserted into a region of the active site between β5 and α5, where it indirectly contributes to catalytic activity due to its involvement in dimerization. Substitution W336G results in an ADA2 molecule that partly dissociates into monomers, and which exhibits altered catalytic activity (Zavialov et al. (2010) J. Biol. Chem. 285:12367-12377). In addition to affecting full enzymatic activity, dimerization also is involved in the secretion of ADA2. Deletion of amino acids T33 and E41 (corresponding to T4 and E12 of mature ADA2 set forth in SEQ ID NO:5) abolishes secretion of ADA2 into the culture medium (Zavialov et al. (2010) J. Biol. Chem. 285:12367-12377).

[0453] ADA2 binds glycosaminoglycans (GAGs), including heparin and its analogs, such as heparan sulfate, and chondroitin sulfate. Protein dimerization results in a large, highly positively charged surface at the interface of dimer, which forms the GAG-binding site (Zavialov et al. (2010) J. Biol. Chem. 285:12367-12377). In particular, the GAG-binding site involves amino acid residues near positions I30-R45, S389-T396 and R422-T428 of precursor ADA2 (corresponding to I1-R16, S360-T367, and R393-T399 of mature ADA2 set forth in SEQ ID NO:5). The interaction with GAGs appears to play a role in stabilizing the ADA2 dimer.

[0454] ADA2 has an insertion sequence within the catalytic domain, designated the putative receptor-binding (PRB) domain, which is reported to correspond to residues 127-185 or 134-177 of precursor ADA2 set forth in SEQ ID NO:2 (positions 98-156 or 105-148, respectively, of mature ADA2 set forth in SEQ ID NO:5). The PRB domain folds into a chemokine-like domain made up of an α- and β-fold composed of a three-stranded antiparallel β-sheet surrounded by α-helices on one side and a proline-rich loop on the other side. A disulfide bond between positions 137 and 159 of precursor ADA2 (positions 108 and 130 of mature ADA2 set forth in SEQ ID NO:5) is present in the PRB domain, which is required for ADA2 secretion and structural stability. The crystal structure of ADA2 shows that the PRB domain, while not involved in the catalytic function of ADA2, sits on the top of the adenosine deaminase (ADA) domain at the edge of the active site. When ADA2 dimerizes, the two PRB domains in the dimer are present on the same side of the dimer, and could bind dimeric receptors or induce receptor dimerization (Zavialov et al. (2010) J. Biol. Chem. 285:12367-12377; Zavialov et al. (2010) J. Leukoc. Biol. 88:279-290). ADA2 binds adenosine receptors (ADRs) which are dimeric receptors. The PRB domain is implicated in its growth factor activity through the receptor binding activity (Zavialov et al. (2010) J. Biol. Chem. 285:12367-12377; Zavialov et al. (2010) J. Leukoc. Biol. 88:279-290). Thus, elimination or modification of this domain can reduce, attenuate or eliminate this activity.

[0455] ADA2 has four (4) native N-linked glycosylation sites, at N127, N174, N185 and N378 of precursor ADA2 (corresponding to N98, N145, N156 and N349 of mature ADA2 set forth in SEQ ID NO:5). Three N-glycosylation sites are present in the PRB domain, at N127, N174, and N185, and one is present on the opposite side of the molecule, at N378. The oligosaccharide chains located on three different faces of the ADA2 molecule protects the enzyme against proteolysis in the extracellular environment, providing increased stability (Zavialov et al. (2010) J. Biol. Chem. 285:12367-12377).

[0456] b. Activities of ADA2

[0457] ADA2 has several activities. ADA2 has adenosine deaminase (ADA) activity, which catalyzes adenosine to inosine (adenosine+H₂O=inosine+NH₃) and 2′-deoxyadenosine to 2′-deoxyinosine (2′-deoxyadenosine+H₂O=2′-deoxyinosine+NH₃) reactions. Coformycin and 2′-deoxycoformycin are potent inhibitors of ADA1 and ADA2. Due to differences in the substrate binding pocket, however, the inhibitor (+)-erythro-9-(2-hydroxy-3-nonyl)adenine (EHNA) selectively inhibits ADA1, but does not inhibit ADA2. Also, the differences in the substrate binding pocket account for differences in substrate binding affinity between ADA1 and ADA2. For example, while the k_{cat} values for adenosine are similar due to the high structural similarity of the catalytic residues in ADA2 and ADA1, the Kₘ for adenosine are different. The Kₘ of ADA2 for adenosine is approximately 2.25 mM. Because ADA2 has a hydrophobic subpocket for substrate binding, the affinity for ADA2 for substrates is different from that of ADA1. The Kₘ of ADA2 for adenosine is approximately 100 times higher than that of ADA1, which is approximately 0.1 mM.

[0458] The optimal pH for activity of ADA2 is around pH 6.5, and its activity decreases at a pH higher than 7.0. In contrast, the optimal pH for ADA1 is around pH 7.5. Different substrate affinity and pH optimum indicate that ADA2 is adapted for specific microenvironments, and serve overlapping yet different functions in regulation of adenosine concentration and signaling (Zavialov et al. (2005) Biochem. J. 391:51-57). The acidic optimum pH for ADA2 and requirement for high adenosine concentration indicates that ADA2 can be active specific environments, such as sites of inflammation or tumors, where adenosine concentration is elevated and pH is lower. In the tumor microenvironment, tumor cells can undergo extensive glycolysis due to the hypoxic environment, and the extracellular microenvironment becomes acidic (pH 6.5-6.9) in certain regions.

[0459] In humans, ADA2 is widely expressed, with most abundant expression in adult heart, lung, lymphoblasts, and placenta as well as fetal lung, liver, and kidney. ADA2 is also detected in blood plasma at the protein level. The majority of ADA activity in normal human serum or plasma are from ADA2 (Neidzwicki and Aberneth (1991) Biochemical Pharmacology 41:1615-1624). ADA2 is secreted by activated cells, including activated monocytes and other immune cells, and to a more limited extent, by unstimulated lymphocytes (Iwaki-Egawa et al. (2006) Biol. Chem. 387:319-321). Immune cells, such as monocytes, are activated in inflammatory sites and tumors, where extracellular adenosine deaminase is accumulated (Sitkovsky et al. (2004) Annu. Rev Immunol. 22:657-682). ADA2 could be involved in the regulation of adenosine levels in these specific environments (Zavialov et al. (2010) J. Leukoc. Biol. 88:279-290). For example, ADA2 could function to reduce the level of adenosine in environments with high adenosine concentrations, such as at inflammation sites or in the tumor microenvironment with hypoxic conditions.

[0460] ADA2 activity is elevated in plasma from patients suffering from liver diseases, such as chronic hepatitis and cirrhosis, AIDS, adult T-cell leukemia, acute lymphoblastic leukemia, tuberculosis and diabetes mellitus. (Zavialov et al. (2005) Biochem. J. 391:51-57). In addition, ADA2 levels are elevated in tuberculosis pleural effusion in recent Mycobacterium tuberculosis (MTB) infections (Valdez) or in visceral leishmaniasis (Tripathi et al., Clinica Chimica Acta 388 (2008) 135-138). The pleural effusion of MTB infection contain a high number of macrophages and CD4+ cells, indicating that ADA2 secretion by macrophages could modulate the immune response during MTB infection (Zavialov et al. (2010) J. Leukoc. Biol. 88:279-290).

[0461] ADA2 binds to the cell surface via GAG proteoglycans (e.g. heparin) and ADRs.

[0462] Heparin analogs such as heparan sulfate proteoglycan (HSPG), or chondroitin sulfate (CS)-containing proteoglycans are present on the cell surface and are involved in protein localization and cell signaling. ADA2 can bind various types of cells via these heparin analogs, and the binding is tighter to a more highly sulfated heparin sulfate than to less sulfated heparin, indicating that the binding involves extensive ionic interaction. In contrast to ADA2, ADA1 does not bind to heparin (Zavialov et al. (2005) Biochem. J. 391:51-57, Zavialov et al. (2010) J. Biol. Chem. 285:12367-12377).

[0463] In addition to heparin analogs containing proteoglycans, ADA2 dimer binds to adenosine receptors (ADRs), which function as dimers (Zavialov et al. (2005) Biochem. J. 391:51-57, Zavialov et al. (2010) J. Biol. Chem. 285:12367-12377). ADA2 is reported to interact with cells to mediate growth factor activity. ADA2 can also directly bind to some dimeric adenosine receptors, stimulate proliferation of monocyte-activated CD4 T cells independently of its catalytic activity, induce T cell-dependent differentiation of monocytes into macrophages and stimulate macrophage proliferation. For example, ADA2 increases the rate of proliferation of monocyte-activated CD4 T cells independently of its catalytic activity, and induces T cell-dependent differentiation of monocytes into macrophages and stimulates macrophage proliferation (Zavialov et al. (2010) J. Leukoc. Biol. 88:279-290).

[0464] Defects or deficiencies in ADA2 have been associated with increased vascular inflammation and vasculopathy, in particular associated with Polyarteritis nodosa or Sneddon syndrome (Zhou et al. (2014) N. Engl. J. Med 370:911-920; Navon Elkan et al. (2014) N. Engl. J. Med 370:921-931; Garg et al. (2014) Eur. J. Pediatr 173:827-830; Bras et al. (2014) New Eng. J. Med., 371:479-48; Belot et al. (2014) Pediatric Rheumatology 12:44). For example, vasculitis is associated with recessive mutations in the gene encoding for ADA2 characterized by mutations G47A, G47R, G47V, A109D, H112Q, V119A, G142S, R169Q, P193L, P251L, W264S, Y453C with reference to precursor ADA2 set forth in SEQ ID NO:2 (Navon Elkan et al. (2014) N. Engl. J. Med 370:921-931; Zhou et al. (2014) N. Engl. J. Med 370:911-920; Bras et al. (2014) New Eng. J. Med., 371:479-480).

[0465] 2. ADA2 Variants

[0466] Provided herein are variants or mutants of ADA2 containing a polypeptide that contains one or more amino acid modifications (i.e. changes in amino acid sequence) compared to a reference or unmodified ADA2. The modifications can be in any reference or unmodified ADA2 polypeptide, so long as the reference ADA2 does not already contain the amino acid change at the modified position(s). For example, the modification(s) can be in an ADA2 polypeptide that contains the sequence of amino acids set forth in any of SEQ ID NOS:5 or 326-336, 338-342, 375 or 380-383, a catalytically active fragment thereof or a sequence of amino acids that exhibits at least 85%, 86%, 87%, 88%, 89%, 90%, 91%, 92%, 93%, 94%, 95%, 96%, 97%, 98%, 99% or more sequence identity to any of SEQ ID NOS:5 or 326-336, 338-342, 375 or 380-383 or a catalytically active fragment thereof but does not contain the modification(s).

[0467] In particular examples, the modifications are in an ADA2 polypeptide set forth in SEQ ID NO:5, a catalytically active fragment thereof or in a sequence of amino acids that exhibits at least 85%, 86%, 87%, 88%, 89%, 90%, 91%, 92%, 93%, 94%, 95%, 96%, 97%, 98%, 99% or more sequence identity to SEQ ID NO:5 or a catalytically active fragment thereof but does not contain the modification(s). For example, modifications can be in an ADA2 having a sequence of amino acids set forth in any of SEQ ID NOS:5, 326-334, 340, 375 or 380-383. Modifications also can be in a catalytically active portion of SEQ ID NO:5. For example, a catalytically active ADA2 can be one that lacks all or a portion of the PRB domain, such as those set forth in any of SEQ ID NOS:548-550 or 579. In particular examples, modifications are in a human ADA2 containing the sequence of amino acids set forth in SEQ ID NO:5.

[0468] In examples of a variant ADA2 polypeptide provided herein, the variant ADA2 does not have the sequence of amino acids set forth in any of SEQ ID NOS: 1, 5, 68, 286-302, 326-342 or 374-383. Also, in examples herein, the variant ADA2 polypeptide does not contain modifications that are deletion R8-K14del→--or that are an amino acid replacement H7R, G18A, G18R, G18V, I64T, A80D, H83Q, V90A, C108G, H121R, W133G, R140Q, K141R, P164L, P222L, W235S, H306R, E330G, W333G, V365L, Y424C, F464S, with numbering with reference to amino acid residues set forth in SEQ ID NO:5.

[0469] The variant ADA2 can be a monomer or can be a dimer, such as a heterodimer or a homodimer. The variant ADA2 polypeptides provided herein exhibit adenosine deaminase activity to catalyze the conversion of adenosine to inosine. It is understood that such activity is exhibited when the variant ADA2 polypeptide is in active form, such as when it is present as a dimer. Typically, such activity is present when the ADA2 is in dimer form. Hence, any of the variants provided herein can be used to regulate adenosine levels in environments where regulation of adenosine-dependent immunomodulation or other adenosine-dependent activity is needed, such as in a tumor microenvironment or for inflammation. Hence, any of the variants provided herein can be used in methods of treating tumor or cancer as described herein.

[0470] When in active form, such as when in dimer form, the variant ADA2 containing the variant ADA2 polypeptide can exhibit about 50% to 500%, such as about 50% to 400%, 50% to 300%, 50% to 200%, 50% to 150%, 50% to 100%, 50% to 80%, 80% to 400%, 80% to 300%, 80% to 200%, 80% to 150%, 80% to 100%, 100% to 400%, 100% to 300%, 100% to 200% or 100% to 150% of the adenosine deaminase activity compared to the corresponding form of the ADA2 polypeptide not containing the modification(s) (i.e. the unmodified ADA2), such as an ADA2 homodimer containing the sequence of amino acids set forth in SEQ ID NO:5, 326-334, 340, 375 or 380-383 or a catalytically active fragment thereof. For example, when in active form, such as when in dimer form, the variant ADA2 containing the variant ADA2 polypeptide can exhibit at least 50%, 60%, 70%, 75%, 80%, 85%, 90%, 95%, 100%, 110%, 120%, 130%, 140%, 150%, 160%, 170%, 180%, 190%, 200%, 210%, 220%, 230%, 240%, 250%, 260%, 270%, 280%, 290%, 300%, 350%, 400%, 450%, 500% or more of the adenosine deaminase activity compared to the corresponding form of the ADA2 polypeptide not containing the modification(s) (i.e. the unmodified ADA2), such as an ADA2 homodimer containing the sequence of amino acids set forth in SEQ ID NO:5, 326-334, 340, 375 or 380-383 or a catalytically active fragment thereof. Typically, a variant ADA2 containing a variant ADA2 polypeptide provided herein, when in dimer form, retains adenosine deaminase activity of the corresponding form of the ADA2 homodimer containing the sequence of amino acids set forth in SEQ ID NO:5 or a catalytically active fragment thereof, such that the variant ADA2, when in dimer form, exhibits at least 50%, 60%, 70%, 75%, 80%, 85%, 90%, 95%, 100%, 110%, 120%, 130%, 140%, 150%, 160%, 170%, 180%, 190%, 200%, 210%, 220%, 230%, 240%, 250%, 260%, 270%, 280%, 290%, 300%, 350%, 400%, 450%, 500% or more of the adenosine deaminase activity of the ADA2 homodimer containing the sequence of amino acids set forth in SEQ ID NO:5 or a catalytically active fragment thereof.

[0471] Typically, the catalytic efficiency or k_{cat}/K_{M} (M⁻¹s⁻¹) of variant ADA2 containing a variant ADA2 polypeptide provided herein is at least 5,000, such is generally from or from about 5×10³ to 5×10⁶, 5×10³ to 2.5×10⁶, 5×10³to 1×10⁶, 5×10³ to 5×10⁵, 5×10³ to 2.5×10⁵, 5×10³ to 1×10⁵, 5×10³ to 8×10⁴, 5×10³ to 5×10⁴, 5×10³ to 2.5×10⁴, 5×10³ to 1×10⁴, 1×10⁴ to 5×10⁵, 1×10⁴ to 2.5×10⁵, 1×10⁴ to 1×10⁵, 1×10⁴ to 8×10⁴, 1×10⁴ to 5×10⁴, 1×10⁴ to 2.5×10⁴, 2.5×10⁴ to 5×10⁶, 2.5×10⁴ to 2.5×10⁶, 2.5×10⁴ to 1×10⁶, 2.5×10⁴ to 5×10⁵, 2.5×10⁴ to 2.5×10⁵, 2.5×10⁴ to 1×10⁵, 2.5×10⁴ to 8×10⁴, 2.5×10⁴ to 5×10⁴, 5×10⁴ to 5×10⁶, 5×10⁴ to 2.5×10⁶, 5×10⁴ to 1×10⁶, 5×10⁴ to 5×10⁵, 5×10⁴ to 2.5×10⁵, 5×10⁴ to 1×10⁵, 5×10⁴ to 8×10⁴, 8×10⁴ to 5×10⁶, 8×10⁴ to 2.5×10⁶, 8×10⁴ to 1×10⁶, 8×10⁴ to 5×10⁵, 8×10⁴ to 2.5×10⁵, 8×10⁴ to 1×10⁵, 1×10⁵ to 5×10⁶, 1×10⁵ to 2.5×10⁶, 1×10⁵ to 1×10⁶, 1×10⁵ to 5×10⁵, 1×10⁵ to 2.5×10⁵, 2.5×10⁵ to 5×10⁶, 2.5×10⁵ to 2.5×10⁶, 2.5×10⁵ to 1×10⁶, 2.5×10⁵ to 5×10⁵, 5×10⁵ to 5×10⁶, 5×10⁵ to 2.5×10⁶, or 5×10⁵ to 1×10⁶ M⁻¹s⁻¹. For example, variant ADA2 containing a variant ADA2 polypeptide provided herein has a catalytic efficiency of k_{cat}/K_{M} (M⁻¹s⁻¹) of at least 5×10³, 6×10³, 7×10³, 8×10³, 9×10³, 1×10⁴, 2×10⁴, 3×10⁴, 4×10⁴, 5×10⁴, 6×10⁴, 7×104, 8×10⁴, 9×10⁴, 1×10⁵, 2×10⁵, 3×10⁵, 4×10⁵, 5×10⁵, or greater, or 6×10⁵, 7×10⁵, 8×10⁵, 9×10⁵, 1×10⁶, 2×10⁶, 3×10⁶, 4×10⁶, 5×10⁶ M⁻¹s^{-1 1} or greater.

[0472] The variant ADA2 polypeptide provided herein can contain amino acid replacements (i.e. substitutions), additions (i.e. insertions), deletions, truncations or combinations thereof. The variant ADA2 can contain modification(s) in any region or domain of an ADA2 polypeptide provided the resulting variant ADA2, when in active form, for example as a dimer, at least retains adenosine deaminase activity. For purposes herein, reference to modification(s) in an ADA2 polypeptide is with respect to residues of the mature ADA2 polypeptide set forth in SEQ ID NO:5. Amino acid replacements can be made at corresponding residues of any ADA2 polypeptide or catalytically active fragment thereof, including in any ADA2 polypeptide or variant ADA2 polypeptide known in the art. Corresponding residues can be identified by alignment with the mature polypeptide set forth in SEQ ID NO:5 (see e.g. FIG. 1, Table 1). Reference also is made throughout the application and Examples to numbering based on Zavialov (Zavialov et al. (2010) J. Biol. Chem. 285:12367-12377), which is based on the numbering of amino acids residues set forth in SEQ ID NO:4. See Table 1, which sets forth the corresponding position numbers of Zavialov numbering (SEQ ID NO:4) and mature ADA2 numbering (SEQ ID NO:5).

[0473] To retain adenosine deaminase activity, modifications typically are not at those positions that are less tolerant to change. Such positions can be within domains or regions that are required for catalytic activity, substrate binding and/or dimerization. For example, such positions include regions that are highly conserved, such as residues required for zinc coordination or active site residues. A skilled artisan knows or can readily identify amino acid residues that are required for activity and should not be changed. Also, in some instances if a modification is at these positions, it generally is a conservative amino acid substitution. One of skill in the art understands conservative amino acid substitutions, such as those provided in Table 3, can be used to reduce the likelihood of a modification resulting in a reduction in activity.

[0474] Variant ADA2 proteins provided herein can contain a polypeptide subunit that exhibits at least 85%, 86%, 87%, 88%, 89%, 90%, 91%, 92%, 93%, 94%, 95%, 96%, 97%, 98%, 99% or more sequence identity to the polypeptide sequence of the unmodified or reference ADA2 polypeptide, such as those set forth in any of SEQ ID NOS:5, 326-334, 340, 375 or 380-383, or a catalytically active fragment thereof. In particular, variant ADA2 proteins provided herein contain a polypeptide subunit that exhibits at least 85%, 86%, 87%, 88%, 89%, 90%, 91%, 92%, 93%, 94%, 95%, 96%, 97%, 98%, 99% or more sequence identity to the polypeptide sequence set forth in SEQ ID NO:5 or a catalytically active fragment thereof. The variant ADA2 proteins provided herein can contain a polypeptide subunit that can contain at least or about or 1, 2, 3, 4, 5, 6, 7, 8, 9, 10, 11, 12, 12, 14, 15, 16, 17, 18, 19, 20, 21, 22, 23, 24, 25, 26, 27, 28, 29, 30, 31, 32, 33, 34, 35, 36, 37, 38, 39, 40, 41, 42, 43, 44, 45, 46, 47, 48, 49, 50 or more amino acid modification(s) compared to the polypeptide sequence of the unmodified or reference ADA2 polypeptide. It is understood that when present as a dimer or multimer, the variant ADA2 can contain at least or about or 1, 2, 3, 4, 5, 6, 7, 8, 9, 10, 11, 12, 12, 14, 15, 16, 17, 18, 19, 20, 21, 22, 23, 24, 25, 26, 27, 28, 29, 30, 31, 32, 33, 34, 35, 36, 37, 38, 39, 40, 41, 42, 43, 44, 45, 46, 47, 48, 49, 50, 51, 52, 53, 54, 55, 56, 57, 58, 59, 60, 61, 62, 63, 64, 65, 66, 67, 68, 69, 70, 71, 72, 73, 74, 75, 76, 77, 78, 79, 80, 81, 82, 83, 84, 85, 86, 87, 88, 89, 90, 91, 92, 93, 94, 95, 96, 97, 98, 99, 100 or more amino acid modification(s).

[0475] For purposes herein, amino acid replacements are denoted by the replaced amino acid, the amino acid position and the replacing amino acid (e.g. K11A by mature numbering, which represents that the amino acid at a position corresponding to amino acid residue 11 in SEQ ID NO:5, e.g. lysine, is replaced by alanine). For purposes herein, amino acid replacements can also be denoted by the replaced amino acid, the amino acid position and the replacing amino acid (e.g. K14A by Zavialov numbering, which represents that the amino acid at a position corresponding to amino acid residue 14 in SEQ ID NO:4, e.g. lysine, is replaced by alanine). See Table 1, which sets forth the corresponding position numbers of Zavialov numbering (SEQ ID NO:4) and mature ADA2 numbering (SEQ ID NO:5). Nomenclature also is employed herein to represent the insertion (--→followed by position of insertion) or deletion (e.g. position of deletion (del) followed by→--) of an amino acid residue at a corresponding position in SEQ ID NO:5, by mature numbering, and/or by SEQ ID NO:4, by Zavialov numbering. For example, --→N1 by mature numbering means that the residue at position 1 is inserted compared to the corresponding sequence of mature ADA2 set forth in SEQ ID NO:5. For example, --→N4 by Zavialov numbering means that the residue at position 4 is inserted compared to the corresponding sequence of ADA2 set forth in SEQ ID NO:4. It is understood that in some cases, due to deletions or insertions of amino acid residues, the numbering of residues in a variant ADA2 polypeptide is altered compared to the numbering of residues set forth in SEQ ID NO:5. In such instances, it is within the level of a skilled artisan to identify residues in the corresponding variant ADA2 polypeptide that correspond to residues in SEQ ID NO:5, for example by alignment as demonstrated in FIG. 1. For example, the numbering of residues in a variant ADA2 polypeptide can be numbered based on Zavialov (Zavialov et al. (2010) J. Biol. Chem. 285:12367-12377), which is based on the numbering of amino acids residues set forth in SEQ ID NO:4. See Table 1, which sets forth the corresponding position numbers of Zavialov numbering (SEQ ID NO:4) and mature ADA2 numbering (SEQ ID NO:5).

[0476] Exemplary modifications in a variant ADA2 polypeptide provided herein are described in further detail below. The variant ADA2 provided herein include those that, when in active form, exhibit altered or improved activities or properties compared to the corresponding form of the reference or wildtype ADA2 not containing the modification(s) (i.e. the unmodified ADA2). For example, the variant ADA2 provided herein include those that, when in active form, exhibit altered or improved activities or properties compared to the corresponding form of an unmodified ADA2 containing an ADA2 polypeptide having a sequence of amino acids that exhibits at least 85% sequence identity to SEQ ID NO:5 or a catalytically active fragment thereof, such as those set forth in any of SEQ ID NOS:5, 326-334, 340, 375 or 380-383, or a catalytically active fragment thereof. In particular, the modifications provided herein can affect any one or more activities from among increased adenosine deaminase activity, attenuated heparin binding, increased half-life, altered pH optimum, increased thermal stability, reduced receptor binding, or hyperglycosylation compared to the corresponding form of the ADA2 not containing the modifications (i.e. the unmodified ADA2).

[0477] In particular, the active form is the dimer form, such as the homodimer form, that contains the variant ADA2 polypeptide. Thus, in examples herein, variant ADA2 proteins containing a variant ADA2 polypeptide provided herein, when in dimer form, exhibit altered or improved activities or properties compared to the corresponding dimer form of the reference or wildtype ADA2 not containing the modifications. For example, the variant ADA2 provided herein include those that, when in dimer form, exhibit altered or improved activities or properties compared to the corresponding dimer form of an unmodified ADA2 containing an ADA1 polypeptide having a sequence of amino acids that exhibits at least 85% sequence identity to SEQ ID NO:5 or a catalytically active fragment thereof, such as those set forth in any of SEQ ID NOS:5, 326-334, 340, 375 or 380-383, or a catalytically active portion thereof. For example, provided are variant ADA2 containing a variant ADA2 polypeptide provided herein that, when in dimer form, exhibit altered or improved activities or properties compared to the ADA2 homodimer containing the sequence of amino acids set forth in SEQ ID NO:5 or a catalytically active fragment thereof. In particular, the modifications provided herein can affect any one or more activities from among increased adenosine deaminase activity, attenuated heparin binding, increased half-life, altered pH optimum, increased thermal stability, reduced receptor binding, or hyperglycosylation compared to the corresponding form of the ADA2 not containing the modifications (i.e. the unmodified ADA2).

[0478] For example, provided herein are variant ADA2 proteins that, when in active form such as dimer form, exhibit increased adenosine deaminase activity. For example, the variant ADA2 protein, when in active form such as dimer form, can exhibit at least 110%, 120%, 130%, 140%, 150%, 160%, 170%, 180%, 190%, 200%, 225%, 250%, 300%, 350%, 400%, 450%, 500%, 600%, 700%, 800%, 900%, 1000% or more activity of the corresponding form of the unmodified ADA2, wherein adenosine deaminase activity is assessed under the same conditions. The catalytic efficiency (k_{cat}/K_{M}) of a variant ADA2 that exhibits increased adenosine deaminase activity is at least or at least about 1.2-fold, 1.3-fold, 1.4-fold, 1.5-fold, 1.6-fold, 1.7-fold, 1.8-fold, 1.9-fold, 2.0-fold, 2.2-fold, 2.5-fold, 3.0-fold, 3.5-fold, 4-fold, 4.5-fold, 5.0-fold, 6.0-fold, 7.0-fold, 8.0-fold, 9.0-fold, 10.0-fold greater or more, or 11.0-fold, 12.0-fold, 13.0-fold, 14.0-fold, 15.0-fold greater or more compared to the catalytic efficiency (k_{cat}/K_{M}) of the corresponding form of the unmodified ADA2, wherein catalytic efficiency of adenosine deaminase activity is assessed under the same conditions. For example, when in dimer form, the variant ADA2 provided herein exhibits a catalytic efficiency (k_{cat}/K_{M}) that is at least 2×10⁴ M⁻¹ s⁻¹, 3×10⁴ M⁻¹ s⁻¹, 4×10⁴ M⁻¹ s⁻¹, 5×10⁴ M⁻¹ s⁻¹, 6×10⁴ M⁻¹ s⁻¹, 7×10⁴ M⁻¹ s⁻¹, 8×10⁴ M⁻¹ s⁻¹, 9×10⁴ M⁻¹ s⁻¹, 1×10⁵ M⁻¹ s⁻¹, 2×10⁵ M⁻¹ s⁻¹, 3×10⁵ M⁻¹ s⁻¹, 4×10⁵ M⁻¹ s⁻¹, 5×10⁵ M⁻¹ s⁻¹ or greater, or 6×10⁵ M⁻¹s⁻¹, 7×10⁵ M⁻¹s⁻¹, 8×10⁵ M⁻¹s⁻¹, 9×10⁵ M⁻¹s⁻¹, 1×10⁶ M⁻¹s⁻¹, 2×10⁶ M⁻¹s⁻¹, 3×10⁶ M⁻¹s⁻¹, 4×10⁶ M⁻¹s⁻¹, 5×10⁶ M⁻¹ s⁻¹ or greater.

[0479] In examples herein, provided herein are variant ADA2 proteins that, when in active form such as dimer form, exhibit reduced binding to any one or more adenosine receptor (ADR) selected from among A₁, A_{2A}, A_{2B} and A₃, and typically one or both of A_{2A} or A_{2B}. Without being bound by theory, it is contemplated herein that the activity of the adenosine deaminase activity provided herein for converting adenosine to inosine is greater or more efficient if binding of the ADA2 to an ADR is reduced. For example, provided herein are variant ADA2, when in active form such as dimer form, in which binding to one or more ADR is reduced at least or at least about 0.5-fold, 1-fold, 1.5-fold, 2-fold, 3-fold, 4-fold, 5-fold, 6-fold, 7-fold, 8-fold, 9-fold, 10-fold or more compared to the corresponding form of the unmodified ADA2.

[0480] In examples herein, provided herein are variant ADA2 proteins that, when in active form such as dimer form, exhibit reduced or attenuated heparin binding. ADA2 binds glycosaminoglycans (GAGs), including heparin and its analogs, such as heparan sulfate, and chondroitin sulfate. High-affinity binding to heparin/GAGs is mediated by a large, highly positively charged surface at the interface of dimer, and dimerization of ADA2 forms the heparin binding site. Because glycosaminoglycan is widely present throughout the body, it could interact with the administered ADA2 and act as a peripheral sink. Therefore, an ADA2 with reduced heparin binding can increase the bioavailability and pharmacokinetics of the administered ADA2. For example, ADA2 variants with attenuated heparin binding provided herein, result in improved bioavailability and pharmacokinetics, such as increased half-life, when administered, because the administered ADA2 molecules will not be sequestered in the peripheral sink by binding to the GAGs. In particular, provided herein are variant ADA2 proteins that, when in active form such as dimer form, exhibit no more than 1%, 2%, 3%, 4%, 5%, 6%, 7%, 8%, 9%, 10%, 15%, 20%, 25%, 30%, 35%, 40%, 45%, 50%, 55%, 60%, 65%, 70%, 75%, 80%, 85%, 90%, or 95% of the heparin binding of the corresponding form of the unmodified ADA2, wherein heparin binding is assessed under the same conditions.

[0481] In examples herein, provided are variant ADA2 proteins that, when in active form such as dimer form, exhibit an increased or longer plasma or serum half-life (t₁/2). For example, variant ADA2 provided herein, when in active form such as dimer form, exhibit a half-life that is at least or at least about 110%, 120%, 130%, 140%, 150%, 160%, 170%, 180%, 190%, 200%, 225%, 250%, 300%, 350%, 400%, 450%, 500%, 600%, 700%, 800% or more longer, or 900%, 1000%, 1100%, 1200%, 1300%, 1400%, 1500%, 1600%, 1700%, 1800%, 1900%, 2000%, 3000%, 4000%, 5000%, 6000%, 7000%, 8000%, 9000%, 10000%, or more longer than the half-life of the corresponding form of the unmodified ADA2, wherein half-life is assessed under the same conditions.

[0482] In examples herein, provided are variant ADA2 proteins that, when in active form such as dimer form, exhibit an increased thermal stability. For example, when in active form such as dimer form, variant ADA2 provided herein exhibit thermal stability with a melting temperature (Tm) that is increased at least or at least about 0.5° C., 1.0° C., 2.0° C., 3.0° C., 4.0° C., 5.0° C., 6.0° C., 7.0° C., 8.0° C., 9.0° C., 10.0° C. or more compared to the Tm of the corresponding form of the unmodified ADA2, wherein Tm is assessed under the same conditions. The melting temperature (Tm) of variant ADA2, when in active form such as dimer form, provided herein can be at least or at least about 67.6° C., 67.8° C., 68.0° C., 68.2° C., 68.4° C., 68.6° C., 68.8° C., 69.0° C., 69.2° C., 69.4° C., 69.6° C., 69.8° C., 70.0° C., 70.2° C., 70.4° C., 70.6° C., 70.8° C., 71.0° C., 71.2° C., 71.4° C., 71.6° C., 71.8° C. or higher.

[0483] In examples herein, the adenosine deaminase activity of ADA2 or variants can be exhibited at a pH optima of from or from about pH 6.0 to pH 7.6, such as a pH of at least pH 6, 6.25, 6.5, 6.75, 7, 7.25 or 7.5. For example, ADA2 has a pH optima of at or about pH 6.5±0.2. Variant ADA2 proteins provided herein can exhibit a pH optima for adenosine deaminase activity of from or from about pH 6.0 to 6.8, such as at or about pH 6.5±0.2. In some cases, the variant ADA2 exhibits an altered pH optimum and the catalytic activity can be exhibited at a higher pH that is from or from about pH 6.8 to pH 7.6, such as from or from about pH 7.0 to pH 7.5 or pH 7.2 to pH 7.4, each inclusive. Since proliferating tissue near blood vessels in the TME can have a more neutral pH, such variants could be more active in particular tumor environments. For example, ADA2 variant can exhibit a pH optima for adenosine deaminase activity of at least pH 6.8, 6.9, 7.0, 7.1, 7.2, 7.3, 7.4, 7.5, 7.6 or higher. Based on this description, it is within the level of one of skill in the art to generate a variant ADA2 containing any one or more of the described modification(s), and test each for adenosine deaminase activity and/or one or more of properties from among heparin binding, half-life, pH optimum, thermal stability, receptor binding and/or glycosylation as described herein.

a. Exemplary Modifications
i. Amino Acid Replacements

[0484] In one example, the modification(s) can be an amino acid replacement(s). Provided herein are variant ADA2 polypeptides that contain one or more amino acid replacements in an ADA2 polypeptide at an amino acid position corresponding to amino acid residue 11, 13, 20, 22, 26, 86, 109, 118, 119, 124, 133, 139, 179, 183, 191, 217, 219, 221, 224, 258, 262, 264, 266, 267, 277, 283, 296, 309, 317, 321, 352, 366, 371, 372, 373, 374, 403, 404, 405, 406, 441, 444, 452, 461, 469 or 470, by mature numbering, with reference to amino acid residues set forth in SEQ ID NO:5. For example, the amino replacement can be at an amino acid position corresponding to amino acid residue K11, K13, R20, V22, K26, D86, F109, R118, F119, P124, W133, Y139, E179, F183, Y191, R217, R219, L221, Y224, K258, S262, H264, S266, K267, R277, R283, V296, K309, K317, K321, R352, R366, K371, K372, D373, 1374, T403, G404, H405, P406, R441, K444, K452, K461, K469 or K470, by mature numbering, with reference to amino acid residues set forth in SEQ ID NO:5.

[0485] For example, provided herein are variant ADA2 polypeptides that contain one or more amino acid replacements in an ADA2 polypeptide that is any one or more of: K11A, K11D, K11E, K13A, K13D, K13E, R20A, R20D, R20E, R20N, V22S, K26A, K26D, K26E, D86A, D86C, D86E, D86F, D86G, D86H, D86I, D86K, D86L, D86M, D86N, D86P, D86Q, D86R, D86S, D86T, D86V, D86W, D86Y, F109S, F109A, R118D, R118A, F119S, F119K, P124A, P124S, W133S, W133T, Y139T, Y139A, E179A, E179C, E179D, E179F, E179G, E179H, E179I, E179K, E179L, E179M, E179N, E179P, E179Q, E179R, E179S, E179T, E179V, E179W, E179Y, F183K, Y191S, Y191D, R217A, R217D, R217E, R219A, R219C, R219D, R219E, R219F, R219G, R219H, R219I, R219K, R219L, R219M, R219N, R219P, R219Q, R219S, R219T, R219V, R219W, R219Y, L221A, L221C, L221D, L221E, L221F, L221G, L221H, L221I, L221K, L221M, L221N, L221P, L221Q, L221R, L221S, L221T, L221V, L221W, L221Y, Y224R, Y224N, K258A, K258D, K258E, S262A, S262C, S262D, S262E, S262F, S262G, S262H, S262I, S262K, S262L, S262M, S262N, S262P, S262Q, S262R, S262T, S262V, S262W, S262Y, H264A, H264C, H264D, H264E, H264F, H264G, H264I, H264K, H264L, H264M, H264N, H264P, H264Q, H264R, H264S, H264T, H264V, H264W, H264Y, S266A, S266C, S266D, S266E, S266F, S266G, S266H, S266I, S266K, S266L, S266M, S266N, S266P, S266Q, S266R, S266T, S266V, S266W, S266Y, K267A, K267C, K267D, K267E, K267F, K267G, K267H, K267I, K267L, K267M, K267N, K267P, K267Q, K267R, K267S, K267T, K267V, K267W, K267Y, R277A, R277D, R277E, R283A, R283D, R283E, V296A, V296C, V296D, V296E, V296F, V296G, V296H, V296I, V296K, V296L, V296M, V296N, V296P, V296Q, V296R, V296S, V296T, V296W, V296Y, K309A, K309D, K309E, K317A, K317D, K317E, K321A, K321D, K321E, R352A, R352D, R352E, R366A, R366D, R366E, K371A, K371D, K371E, K371N, K372A, K372D, K372E, K372N, D373S, I374S, T403N, G404N, H405S, P406S, R441A, R441D, R441E, K444A, K444D, K444E, K452A, K452D, K452E, K461A, K461D, K461E, K469A, K469D, K469E, K470A, K470D, and K470E, by mature numbering, with reference to amino acid residues set forth in SEQ ID NO:5.

[0486] In particular, provided herein are variant ADA2 polypeptides that contain one or more amino acid replacements in an ADA2 polypeptide that is any one or more of: K11A, K11E, R20A, R20D, R20E, R219K, R219Q, L221A, L221V, L221G, S262N, H264Q, H264G, R366A, R366D, R366E, K371A, K371D, K371E, K372A, K372D, K372E and K452E, by mature numbering, with reference to amino acid residues set forth in SEQ ID NO:5. For example, provided herein are variant ADA2 polypeptides that contain one or more amino acid replacements in an ADA2 polypeptide that is any one or more of: K11A, K11E, R20A, R20E, R219K, R219Q, L221A, L221V, L221G, S262N, H264Q, H264G, R366E, K371A, K371D, K371E, K372D, K372E, K452D and K452E, by mature numbering, with reference to amino acid residues set forth in SEQ ID NO:5. In another example, provided herein are variant ADA2 polypeptides that contain one or more amino acid replacements in an ADA2 polypeptide that is any one or more of R20A, R20D, R20E, S262N, R366A, R366D, R366E, K371A, K371D, K371E, K372A, K372D, K372E and K452E, by mature numbering, with reference to amino acid residues set forth in SEQ ID NO:5. In examples, provided herein are variant ADA2 polypeptides that contain one or more amino acid replacements in an ADA2 polypeptide that is any one or more of K11A, R20A, R20E, R219Q, S262N, K371A, K371D or K371E, by mature numbering, with reference to amino acid residues set forth in SEQ ID NO:5.

[0487] Also provided herein are variant ADA2 polypeptides that contain 2, 3, 4, 5, 6, 7, 8, 9, 10, 11, 12, 13, 14, 15, 16, 17, 18, 19 or 20 amino acid replacements compared to the reference ADA2 polypeptide not containing the modifications (i.e. the unmodified ADA2). Variant ADA2 polypeptides can contain any two or more amino acid replacements provided above, so long as the resulting ADA2 variant exhibits or retains adenosine deaminase activity. The two or more amino acid replacements can confer the same altered activity or a different altered activity. For example, one amino acid replacement can confer altered heparin binding and the other can confer increased adenosine deaminase activity. Hence, the resulting ADA2 polypeptide variants exhibit two or more altered activities or properties.

[0488] For example, provided herein are variant ADA2 polypeptides that contain amino acid replacements K11A/R20A; K11A/R20A/K371A; R20A/K371A; K11A/K371A; S262N/K371D; S262N/K371E; S262N/R20E; S262N/R20E/K371D; S262N/R20E/K371E; R219Q/K371E; R219Q/K371D; R219Q/R20E; R219Q/K371E/R20E; R219Q/K371D/R20E; R219Q/S262N/K371E; R219Q/S262N/K371D; R219Q/S262N/R20E; R219Q/S262N/K371E/R20E; R219Q/S262N/K371D/R20E; or R219Q/S262N, by mature numbering, with reference to amino acid residues set forth in SEQ ID NO:5.

[0489] For example, provided herein are variant ADA2 polypeptides that contain amino acid replacements K11A/R20A; K11A/R20A/K371A; R20A/K371A; K11A/K371A; S262N/K371D; S262N/K371E; S262N/R20E; S262N/R20E/K371D; S262N/R20E/K371E; R219Q/K371E; R219Q/K371D; R219Q/R20E; R219Q/K371E/R20E; R219Q/K371D/R20E; R219Q/S262N/K371E; R219Q/S262N/K371D; R219Q/S262N/R20E; R219Q/S262N/K371E/R20E; R219Q/S262N/K371D/R20E; or R219Q/S262N, by mature numbering, with reference to amino acid residues set forth in SEQ ID NO:5.

[0490] Exemplary of such variant ADA2 polypeptides are any set forth in any of SEQ ID NOS:13-63 or 71-273, or a catalytically active portion thereof.

[0491] In other examples, also provided herein are variant ADA2 polypeptides that contain amino acid replacements R219Q/S262N/K11A; R219Q/S262N/K11D; R219Q/S262N/K11E; R219Q/S262N/K13A; R219Q/S262N/K13D; R219Q/S262N/K13E; R219Q/S262N/K371A; R219Q/S262N/K372A; R219Q/S262N/K372D; R219Q/S262N/K372E; R219Q/S262N/K452A; R219Q/S262N/K452D; R219Q/S262N/K452E; R219Q/S262N/R20A; R219Q/S262N/R20D; R219Q/S262N/R366A; R219Q/S262N/R366D; R219Q/S262N/R366E; R219Q/S262N/H264A; R219Q/S262N/H264Q; R219Q/S262N/H264N; R219Q/S262N/H264G; R219K/S262N; R219N/S262N; R219A/S262N; R219Q/S262N/L221A; R219Q/S262N/L221V; R219Q/S262N/L221G; R219Q/S262N/E179D; R219Q/S262N/E179A; R219Q/S262N/E179S; R219Q/S262N/E179T; R219Q/S262N/E179V; R219Q/S262N/E179G; R219Q/S262A; R219Q/S262V; R219Q/S262M; R219Q/S262N/K11A/R20A; R219Q/S262N/K11A/R20A/K371A; R219Q/S262N/R20A/K371A; R219Q/S262N/K11A/K371A; R219Q/S262N/K26A; R219Q/S262N/K26D; R219Q/S262N/K26E; R219Q/S262N/R217A; R219Q/S262N/R217D; R219Q/S262N/R217E; R219Q/S262N/K258A; R219Q/S262N/K258D; R219Q/S262N/K258E; R219Q/S262N/R277A; R219Q/S262N/R277D; R219Q/S262N/R277E; R219Q/S262N/R283A; R219Q/S262N/R283D; R219Q/S262N/R283E; R219Q/S262N/K309A; R219Q/S262N/K309D; R219Q/S262N/K309E; R219Q/S262N/K317A; R219Q/S262N/K317D; R219Q/S262N/K317E; R219Q/S262N/K321A; R219Q/S262N/K321D; R219Q/S262N/K321E; R219Q/S262N/R352A; R219Q/S262N/R352D; R219Q/S262N/R352E; R219Q/S262N/R441A; R219Q/S262N/R441D; R219Q/S262N/R441E; R219Q/S262N/K444A; R219Q/S262N/K444D; R219Q/S262N/K444E; R219Q/S262N/K461A; R219Q/S262N/K461D; R219Q/S262N/K461E; R219Q/S262N/K469A; R219Q/S262N/K469D; R219Q/S262N/K469E; R219Q/S262N/K470A; R219Q/S262N/K470D; R219Q/S262N/K470E; R219Q/S262N/D86A; R219Q/S262N/D86C; R219Q/S262N/D86E; R219Q/S262N/D86F; R219Q/S262N/D86G; R219Q/S262N/D86H; R219Q/S262N/D86I; R219Q/S262N/D86K; R219Q/S262N/D86L; R219Q/S262N/D86M; R219Q/S262N/D86N; R219Q/S262N/D86P; R219Q/S262N/D86Q; R219Q/S262N/D86R; R219Q/S262N/D86S; R219Q/S262N/D86T; R219Q/S262N/D86V; R219Q/S262N/D86W; R219Q/S262N/D86Y; R219Q/S262N/E179C; R219Q/S262N/E179F; R219Q/S262N/E179H; R219Q/S262N/E179I; R219Q/S262N/E179K; R219Q/S262N/E179L; R219Q/S262N/E179M; R219Q/S262N/E179N; R219Q/S262N/E179P; R219Q/S262N/E179Q; R219Q/S262N/E179R; R219Q/S262N/E179W; R219Q/S262N/E179Y; R219C/S262N; R219D/S262N; R219E/S262N; R219F/S262N; R219G/S262N; R219H/S262N; R219I/S262N; R219L/S262N; R219M/S262N; R219P/S262N; R219S/S262N; R219T/S262N; R219V/S262N; R219W/S262N; R219Y/S262N; R219Q/S262N/L221C; R219Q/S262N/L221D; R219Q/S262N/L221E; R219Q/S262N/L221F; R219Q/S262N/L221H; R219Q/S262N/L221I; R219Q/S262N/L221K; R219Q/S262N/L221M; R219Q/S262N/L221N; R219Q/S262N/L221P; R219Q/S262N/L221Q; R219Q/S262N/L221R; R219Q/S262N/L221S; R219Q/S262N/L221T; R219Q/S262N/L221W; R219Q/S262N/L221Y; R219Q/S262C; R219Q/S262D; R219Q/S262E; R219Q/S262F; R219Q/S262G; R219Q/S262H; R219Q/S262I; R219Q/S262K; R219Q/S262L; R219Q/S262P; R219Q/S262Q; R219Q/S262R; R219Q/S262T; R219Q/S262W; R219Q/S262Y; R219Q/S262N/H264C; R219Q/S262N/H264D; R219Q/S262N/H264E; R219Q/S262N/H264F; R219Q/S262N/H264I; R219Q/S262N/H264K; R219Q/S262N/H264L; R219Q/S262N/H264M; R219Q/S262N/H264P; R219Q/S262N/H264R; R219Q/S262N/H264S; R219Q/S262N/H264T; R219Q/S262N/H264V; R219Q/S262N/H264W; R219Q/S262N/H264Y; R219Q/S262N/S266A; R219Q/S262N/S266C; R219Q/S262N/S266D; R219Q/S262N/S266E; R219Q/S262N/S266F; R219Q/S262N/S266G; R219Q/S262N/S266H; R219Q/S262N/S266I; R219Q/S262N/S266K; R219Q/S262N/S266L; R219Q/S262N/S266M; R219Q/S262N/S266N; R219Q/S262N/S266P; R219Q/S262N/S266Q; R219Q/S262N/S266R; R219Q/S262N/S266T; R219Q/S262N/S266V; R219Q/S262N/S266W; R219Q/S262N/S266Y; R219Q/S262N/K267A; R219Q/S262N/K267C; R219Q/S262N/K267D; R219Q/S262N/K267E; R219Q/S262N/K267F; R219Q/S262N/K267G; R219Q/S262N/K267H; R219Q/S262N/K267I; R219Q/S262N/K267L; R219Q/S262N/K267M; R219Q/S262N/K267N; R219Q/S262N/K267P; R219Q/S262N/K267Q; R219Q/S262N/K267R; R219Q/S262N/K267S; R219Q/S262N/K267T; R219Q/S262N/K267V; R219Q/S262N/K267W; R219Q/S262N/K267Y; R219Q/S262N/V296A; R219Q/S262N/V296C; R219Q/S262N/V296D; R219Q/S262N/V296E; R219Q/S262N/V296F; R219Q/S262N/V296G; R219Q/S262N/V296H; R219Q/S262N/V296I; R219Q/S262N/V296K; R219Q/S262N/V296L; R219Q/S262N/V296M; R219Q/S262N/V296N; R219Q/S262N/V296P; R219Q/S262N/V296Q; R219Q/S262N/V296R; R219Q/S262N/V296S; R219Q/S262N/V296T; R219Q/S262N/V296W; R219Q/S262N/V296Y; R219Q/K11A/R20A; R219Q/K11A/R20A/K371A; R219Q/R20A/K371A; R219Q/K11A/K371A; S262N/K11A/R20A; S262N/K11A/R20A/K371A; S262N/R20A/K371A; or S262N/K11A/K371A, by mature numbering, with reference to amino acid residues set forth in SEQ ID NO:5.

[0492] Exemplary of such variant ADA2 polypeptides are any set forth in any of SEQ ID NOS:659-663 or 682-917, or a catalytically active portion thereof

[0493] ii. Modification(s) of PRB Domain

[0494] In other examples, also provided herein are modified ADA2 polypeptides that contain a modified PRB domain. The PRB domain is not required for catalytic activity, and, hence, as shown herein, can be removed so that the ADA2 variant proteins activities other than deaminase activity, mediated by ADA2, are reduced or eliminated. According to the reported domain organization of ADA2, the PRB domain corresponds to residues 98-156 or 105-148 of mature ADA2 set forth in SEQ ID NO:5. The modifications of the PRB domain can include deletion of all or a portion of the PRB domain (i.e. deletion of one or more residues of the PRB domain), insertion of one or more amino acid residues into the PRB domain, amino acid replacement of one or more residues of the PRB domain or a combination thereof to thereby reduce or inhibit binding of the domain to a receptor or other activity thereof. For example, the PRB domain can contain up to or about or 1, 2, 3, 4, 5, 6, 7, 8, 9, 10, 11, 12, 13, 14, 15, 16, 17, 18, 19, 20, 21, 22, 23, 24, 25, 26, 27, 28, 29, 30, 31, 32, 33, 34, 35, 36, 37, 38, 39, 40, 41, 42, 43, 44, 45, 46, 47, 48, 49, 50, 51, 52, 53, 54, 55, 56, 57, 58, or 59 modified positions, such as generally up to or about 1, 2, 3, 4, 5, 6, 7, 8, 9, 10, 11, 12, 13, 14, 15, 16, 17, 18, 19, 20, 21, 22, 23, 24, 25, 26, 27, 28, 29, 30, 31, 32, 33, 34, 35, 36, 37, 38, 39, 40, 41, 42, 43 or 44 modified positions.

[0495] In one example, as described in more detail below, all or a portion of the PRB domain can be deleted, such as by deletion of one or more contiguous amino acid residues of the PRB domain. For example, provided herein are variant ADA2 in which one or more contiguous amino acid residues between or about between amino acid residues 98 and 156 or amino acid residues 105 and 148 or amino acid residues 105 and 147 or amino acid residues 99 and 144, inclusive, with reference to residues set forth in SEQ ID NO:5, are deleted. Exemplary of such ADA2 polypeptides are deletion of contiguous amino acid residues corresponding to contiguous residues 98-156, 105-148, 105-147, 102-147 or 108-150, by mature numbering, with reference to the sequence of amino acids set forth in SEQ ID NO:5. For example, exemplary of such ADA2 polypeptides include polypeptides ADA2_del98-156 (98-156del; SEQ ID NO:548); ADA2_del105-148 (105-148del; SEQ ID NO:549); ADA2_del105-147 (105-147del; SEQ ID NO:550); and ADA2_del99-144 (99-144del; SEQ ID NO:579), by mature numbering, with reference to the sequence of amino acids set forth in SEQ ID NO: 5.

[0496] In some examples, the variant ADA2 that contains a modification in the PRB domain, such as a deletion of contiguous residues, also contains a substitution of the modified or deleted region with a peptide linker. As a result, all or a portion of the PRB domain can be replaced with a sterically acceptable peptide linker sequence. In such examples, at least 2, 3, 4, 5, 6, 7, 8, 9, 10, 11, 12, 13, 14, 15, 16, 17, 18, 19, 20, 21, 22, 23, 24, 25, 26, 27, 28, 29, 30, 31, 32, 33, 34, 35, 36, 37, 38, 39, 40, 41, 42, 43, 44, 45, 46, 47, 48, 49, 50, 51, 52, 53, 54, 55, 56, 57, 58, 59 or all more contiguous amino acids from the PRB domain can be substituted or replaced with amino acids of a peptide linker that generally does not exceed 60 amino acids, and generally does not exceed 2, 3, 4, 5, 6, 7, 8, 9, 10, 11, 12, 13, 14, 15, 16, 17, 18, 19, 20, 21, 22, 23, 24, 25, 26, 27, 28, 29, 30, 35, 40, 45, or 50 amino acids. Any suitable linker can be selected so long as the resulting variant ADA2 exhibits adenosine deaminase activity.

[0497] Examples of peptide linkers include, but are not limited to: (Gly)n, where n is 2 to 20 (SEQ ID NO:368); -Gly-Gly-; GGG (SEQ ID NO:369); GGGG (SEQ ID NO:362); GGGGG (SEQ ID NO:360); GGGGGGG (SEQ ID NO:370); GGGGGGGGGG (SEQ ID NO:371); GGGGGGGGGGGGGGG (SEQ ID NO:372); GGGGS or (GGGGS)n (SEQ ID NO:343); GGGGSGGGGS (SEQ ID NO:580); GGGGSGGGGSGGGGS (SEQ ID NO:367); SSSSG or (SSSSG)n (SEQ ID NO:344); GKSSGSGSESKS (SEQ ID NO:345); GGSTSGSGKSSEGKG (SEQ ID NO:346); GSTSGSGKSSSEGSGSTKG (SEQ ID NO:347); GSTSGSGKPGSGEGSTKG (SEQ ID NO:348); EGKSSGSGSESKEF (SEQ ID NO:349); or AlaAlaProAla or (AlaAlaProAla)n (SEQ ID NO:350), where n is 1 to 6, such as 1, 2, 3, or 4. In particular examples, the peptide linker is GGG (SEQ ID NO:369); GGGGG (SEQ ID NO:360); GGGGGGG (SEQ ID NO:370); GGGGGGGGGG (SEQ ID NO:371); GGGGGGGGGGGGGGG (SEQ ID NO:372); GGGGS (SEQ ID NO:343); GGGGSGGGGS (SEQ ID NO:580); or GGGGSGGGGSGGGGS (SEQ ID NO:367).

[0498] Exemplary of such a modification is a variant ADA2 designated C105-T147del→(Gly)ₙ (SEQ ID NO:280), where n is 2 to 20, whereby the PRB domain in the region corresponding to residues 105-147 with reference to numbering in SEQ ID NO:5 is replaced with a glycine linker of 2 to 20 amino acid residues in length. For example, the variant ADA2 can be C105-T147del→(Gly)₁₅ (SEQ ID NO:281); C105-T147del→(Gly)₁₀ (SEQ ID NO:282); C105-T147del→(Gly)₇ (SEQ ID NO:283); C105-T147del→(Gly)₅ (SEQ ID NO:284) or C105-T147del→(Gly)₃ (SEQ ID NO:285). Further examples of such a modification is a variant ADA designated V99-Q144del→(GGGGS)ₙ (SEQ ID NO:581), where n is 1 to 5, whereby the PRB domain in the region corresponding to residues 99-144 with reference to numbering in SEQ ID NO:5 is replaced with a (GGGGS)ₙ linker where the sequence of amino acids in the linker is repeated 1 to 5 times such that the linker is 5, 10, 15, 20 or 25 amino acid residues in length. For example, the variant ADA2 can be V99-Q144del→(GGGGS)₁ (SEQ ID NO:583); V99-Q144del→(GGGGS)₂ (SEQ ID NO:584); or V99-Q144del→(GGGGS)₃ (SEQ ID NO:585). Further examples of such a modification is a variant ADA designated C105-T147del→(GGGGS)ₙ (SEQ ID NO:582), where n is 1 to 5, whereby the PRB domain in the region corresponding to residues 105-147 with reference to numbering in SEQ ID NO:5 is replaced with a (GGGGS)ₙ linker where the sequence of amino acids in the linker is repeated 1 to 5 times such that the linker is 5, 10, 15, 20 or 25 amino acid residues in length. For example, the variant ADA2 can be C105-T147del→(GGGGS)₁ (SEQ ID NO:586); C105-T147del→(GGGGS)₂ (SEQ ID NO:587); or C105-T147del→(GGGGS)₃ (SEQ ID NO:588), by mature numbering, with reference to the sequence of amino acids set forth in SEQ ID NO:5. Exemplary of such variant ADA2 polypeptides are any set forth in any of SEQ ID NOS:281-285 and 583-588, or a catalytically active portion thereof.

[0499] Also provided herein are variant ADA2 polypeptides that contain deletions, insertions, substitutions and/or amino acid replacements in the PRB domain, combined with other deletions, insertions, substitutions and/or amino acid replacements provided herein. For example, provided are variant ADA2 polypeptides that contain a deletion of all or a portion of the PRB domain, such as by deletion of one or more contiguous amino acid residues of the PRB domain, combined with 1, 2, 3, 4, 5, 6, 7, 8, 9, 10, 11, 12, 13, 14, 15, 16, 17, 18, 19 or 20 additional amino acid replacements compared to the unmodified reference ADA2. Also provided herein are variant ADA2 polypeptides that contain a modification in the PRB domain, such as a deletion of contiguous residues and also contains a substitution of the modified or deleted region with a peptide linker, combined with 1, 2, 3, 4, 5, 6, 7, 8, 9, 10, 11, 12, 13, 14, 15, 16, 17, 18, 19 or 20 additional amino acid replacements compared to the unmodified reference ADA2. For example, the variant ADA2 polypeptides that contain both a deletion of all or portion of the PRB domain and any one or more amino acid replacements provided above, so long as the resulting ADA2 variant exhibits or retains adenosine deaminase activity. The deletion and/or amino acid replacements can confer the same altered activity or a different altered activity. For example, deletion and/or substitution of the PRB domain can confer one altered activity, e.g., reduction in binding to a receptor, and amino acid replacement(s) can confer increased adenosine deaminase activity. Hence, the resulting ADA2 polypeptide variants exhibit two or more altered activities or properties.

[0500] For example, provided herein are variant ADA2 polypeptides that contain the following combination of deletions and/or substitutions and/or amino acid replacements: K371D/V99-Q144del→(GGGGS)₁; K371D/V99-Q144del→(GGGGS)₂; K371D/V99-Q144del→(GGGGS)₃; K371D/C105-T147del→(GGGGS)₁; K371D/C105-T147del→(GGGGS)₂; K371D/C105-T147del→(GGGGS)₃; R219Q/S262N/C105-T147del→(Gly)₁₅; R219Q/S262N/C105-T147del→(Gly)₁₀; R219Q/S262N/C105-T147del→(Gly)₇; R219Q/S262N/C105-T147del→(Gly)₅; R219Q/S262N/C105-T147del→(Gly)₃; R219Q/S262N/V99-Q144del→(GGGGS)₁; R219Q/S262N/V99-Q144del→(GGGGS)₂; R219Q/S262N/V99-Q144del→(GGGGS)₃; R219Q/S262N/C105-T147del→(GGGGS)₁; R219Q/S262N/C105-T147del→(GGGGS)₂; R219Q/S262N/C105-T147del→(GGGGS)₃; R219Q/S262N/K371D/V99-Q144del→(GGGGS)₁; R219Q/S262N/K371D/V99-Q144del→(GGGGS)₂; R219Q/S262N/K371D/V99-Q144del→(GGGGS)₃; R219Q/S262N/K371D/C105-T147del→(GGGGS)i; R219Q/S262N/K371D/C105-T147del→(GGGGS)₂; R219Q/S262N/K371D/C105-T147del→(GGGGS)₃; K371D/C105-T147del→(Gly)n (where n is 2 to 20); K371D/C105-T147del→(Gly)₁₅; K371D/C105-T147del→(Gly)₁₀; K371D/C105-T147del→(Gly)₇; K371D/C105-T147del→(Gly)₅; K371D/C105-T147del→(Gly)₃; K371D/V99-Q144del→(GGGGS)n (where n is 1 to 5); K371D/C105-T147del→(GGGGS)n (where n is 1 to 5); K371D/N98-N156del; K371D/C105-E148del; K371D/C105-T147del; K371D/V99-Q144del; R219Q/S262N/C105-T147del→(Gly)n (where n is 2 to 20); R219Q/S262N/V99-Q144del→(GGGGS)n (where n is 1 to 5); R219Q/S262N/C105-T147del→(GGGGS)n (where n is 1 to 5); R219Q/S262N/N98-N156del; R219Q/S262N/C105-E148del; R219Q/S262N/C105-T147del; R219Q/S262N/V99-Q144del; R219Q/S262N/K371D/C105-T147del→(Gly)n (where n is 2 to 20); R219Q/S262N/K371D/C105-T147del→(Gly)₁₅; R219Q/S262N/K371D/C105-T147del→(Gly)₁₀; R219Q/S262N/K371D/C105-T147del→(Gly)₇; R219Q/S262N/K371D/C105-T147del→(Gly)₅; R219Q/S262N/K371D/C105-T147del→(Gly)₃; R219Q/S262N/K371D/V99-Q144del→(GGGGS)n (where n is 1 to 5); R219Q/S262N/K371D/C105-T147del→(GGGGS)n (where n is 1 to 5); R219Q/S262N/K371D/N98-N156del; R219Q/S262N/K371D/C105-E148del; R219Q/S262N/K371D/C105-T147del; R219Q/S262N/K371D/V99-Q144del; R219Q/C105-T147del→(Gly)n (where n is 2 to 20); R219Q/V99-Q144del→(GGGGS)n (where n is 1 to 5); R219Q/C105-T147del→(GGGGS)n (where n is 1 to 5); R219Q/N98-N156del; R219Q/C105-E148del; R219Q/C105-T147del; R219Q/V99-Q144del; S262N/C105-T147del→(Gly)n (where n is 2 to 20); S262N/V99-Q144del→(GGGGS)n (where n is 1 to 5); S262N/C105-T147del→(GGGGS)n (where n is 1 to 5); S262N/N98-N156del; S262N/C105-E148del; S262N/C105-T147del; and S262N/V99-Q144del, by mature numbering, with reference to amino acid residues set forth in SEQ ID NO:5.

[0501] Exemplary of such variant ADA2 polypeptides are any set forth in any of SEQ ID NOS:589-594, 602-606, 634-658, 664-681, 918-931, or a catalytically active portion thereof.

[0502] iii. Amino Acid Replacement(s) with Altered Interaction Between the PRB Domain and Other Regions of ADA2

[0503] In yet other examples, also provided herein are modified ADA2 polypeptides that contain amino acid replacements that confer altered interaction between the PRB domain and the rest of ADA2 (e.g., the adenosine deaminase (ADA) domain). For example, according to the reported domain organization of ADA2, the PRB domain corresponds to residues 98-156 or 105-148 of mature ADA2 set forth in SEQ ID NO:5. Provided herein are variant ADA2 polypeptides that contain one or more amino acid replacements in an ADA2 polypeptide at an amino acid position corresponding to amino acid residue 109, 118, 119, 124, 133, 139, 183, 191 or 224, by mature numbering, with reference to amino acid residues set forth in SEQ ID NO:5. For example, the amino replacement can be at an amino acid position corresponding to amino acid residue F109, R118, F119, P124, W133, Y139, F183, Y191 or Y224 with reference to amino acid residues set forth in SEQ ID NO:5. Modifications at each position, or combination thereof, can alter the interaction between the PRB domain and other domains in ADA2, such as the ADA domain.

[0504] For example, provided herein are variant ADA2 polypeptides that contain one or more amino acid replacements in an ADA2 polypeptide that is any one or more of: F109S, F109A, R118D, R118A, F119S, F119K, P124A, P124S, W133S, W133T, Y139T, Y139A, F183K, Y191S, Y191D, Y224R or Y224N, by mature numbering, with reference to amino acid residues set forth in SEQ ID NO:5.

[0505] Also provided herein are variant ADA2 polypeptides that contain amino acid replacements that confer altered interaction between the PRB domain and the rest of ADA2, combined with other deletions, insertions, substitutions and/or amino acid replacements provided herein. For example, provided are variant ADA2 polypeptides that contain 2, 3, 4, 5, 6, 7, 8, 9, 10, 11, 12, 13, 14, 15, 16, 17, 18, 19 or 20 amino acid replacements compared to the reference ADA2 polypeptide not containing the modifications (i.e. the unmodified ADA2). Variant ADA2 polypeptides can contain any two or more amino acid replacements provided above, so long as the resulting ADA2 variant exhibits or retains adenosine deaminase activity. The two or more amino acid replacements can confer the same altered activity or a different altered activity. For example, one amino acid replacement can confer altered interaction between the PRB domain the ADA domain, and the other can confer increased adenosine deaminase activity. Hence, the resulting ADA2 polypeptide variants exhibit two or more altered activities or properties.

[0506] For example, provided herein are variant ADA2 polypeptides that contain amino acid replacements Y191D/Y224R; R219Q/S262N/F119S; R219Q/S262N/F119K; R219Q/S262N/Y224R; R219Q/S262N/Y224N; R219Q/S262N/Y191S; R219Q/S262N/Y191D; R219Q/S262N/F183K; R219Q/S262N/Y191D/Y224R; R219Q/S262N/F109S; R219Q/S262N/F109A; R219Q/S262N/R118D; R219Q/S262N/R118A; R219Q/S262N/Y139T; R219Q/S262N/Y139A; R219Q/S262N/W133S; R219Q/S262N/W133T; R219Q/S262N/P124A; or R219Q/S262N/P124S, by mature numbering, with reference to amino acid residues set forth in SEQ ID NO:5.

[0507] Exemplary of such variant ADA2 polypeptides are any set forth in any of SEQ ID NOS:561-578 or 616-633, or a catalytically active portion thereof

[0508] iv. Hyperglycosylation

[0509] Included among the variant ADA2 provided herein are those that have been modified by altering the level and/or type of glycosylation compared to an unmodified ADA2. Glycosylation can be increased or decreased compared to the unmodified ADA2 polypeptide. In some instances, the level or extent of glycosylation is increased, resulting in a hyperglycosylated ADA2 polypeptide or protein. This can be achieved, for example, by incorporation of at least one non-native glycosylation site not found in the unmodified ADA2 polypeptide or protein to which a carbohydrate is linked. Hyperglycosylated ADA2 polypeptides also can be generated by linkage of a carbohydrate moiety to at least one native glycosylation site found but not glycosylated in the unmodified ADA2 polypeptide.

[0510] The variant ADA2 proteins provided herein can contain altered, such as new, 0-linked glycosylation, N-linked glycosylation or O-linked and N-linked glycosylation. In some examples, a variant ADA2 includes 1, 2, 3, 4, 5 or more carbohydrate moieties, each linked to different glycosylation sites. The glycosylation site(s) can be a native glycosylation site(s) and/or a non-native glycosylation site(s). In some examples, the variant ADA2 is glycosylated at more than one non-native glycosylation site. For example, a variant ADA2 can be modified to introduce 1, 2, 3, 4, 5, 6, 7, 8, 9, 10 or more non-native glycosylation sites.

[0511] Non-native glycosylation sites can be introduced by amino acid replacement. O-glycosylation sites can be created, for example, by amino acid replacement of a native residue with a serine or threonine. N-linked glycosylation sites can be created by creating the motif Asn-Xaa-Ser/Thr/Cys, where Xaa is not proline. Creation of this consensus sequence by amino acid modification can involve replacement of a native amino acid residue with an asparagine, replacement of a native amino acid residue with a serine, threonine or cysteine, or replacement of a native amino acid residue with an asparagine and amino acid replacement of native residue with a serine, threonine or cysteine. Non-native glycosylation sites can be created in any region in an ADA2 polypeptide. The level of glycosylation (e.g. the number of introduced non-native glycosylation sites) can be increased by at least about 1%, 2%, 3%, 4%, 5%, 6%, 7%, 8%, 9%, 10%, 20%, 30%, 40%, 50%, 60%, 70%, 80%, 90%, 100%, 200%, 300%, 400%, 500%, or more compared to the level of glycosylation of the corresponding form of the unmodified or wild-type ADA2.

[0512] Exemplary modifications provided herein include introducing a non-native glycosylation site by modification with one or more amino acid replacement(s) that include, but are not limited to, replacement with: N at a position corresponding to position 20 and S at a position corresponding to position 22; N at a position corresponding to position 371 and S at a position corresponding to position 373; N at a position corresponding to position 372 and S at a position corresponding to position 374; N at a position corresponding to position 403 and S at a position corresponding to position 405; and N at a position corresponding to position 404 and S at a position corresponding to position 406, each by mature numbering, with reference to positions set forth in SEQ ID NO:5. For example, amino acid replacement(s) to introduce a non-native glycosylation site can include: R20N/V22S; K371N/D373S; K372N/I374S; T403N/H405S; or G404N/P406S, by mature numbering, with reference to amino acid residues set forth in SEQ ID NO:5.

[0513] In other examples, modifications provided herein include introducing a non-native glycosylation site by modification with one or more amino acid replacement(s) in or near the PRB domain. Exemplary modifications provided herein include introducing a non-native glycosylation site by modification with one or more amino acid replacement(s) that include, but are not limited to, replacement with: N at a position corresponding to position 125 and A at a position corresponding to position 126; N at a position corresponding to position 127 and S at a position corresponding to position 129; N at a position corresponding to position 126 and T at a position corresponding to position 128; N at a position corresponding to position 112 and T at a position corresponding to position 114; N at a position corresponding to position 134, C at a position corresponding to position 135 and T at a position corresponding to position 136; N at a position corresponding to position 134, S at a position corresponding to position 135 and T at a position corresponding to position 136; N at a position corresponding to position 142 and S at a position corresponding to position 144; N at a position corresponding to position 137 and T at a position corresponding to position 139; N at a position corresponding to position 111 and S at a position corresponding to position 113, each by mature numbering, with reference to positions set forth in SEQ ID NO:5. For example, amino acid replacement(s) to introduce a non-native glycosylation site in or near the PRB domain can include: R125N/P126A; S127N/K129S; P126N/E128T; R112N/I114T; 1134N/L135C/L136T; 1134N/L135S/L136T; R142N/Q144S; E137N/Y139T; or P111N/G113S, by mature numbering, with reference to amino acid residues set forth in SEQ ID NO:5.

[0514] In other examples, also provided herein are modified ADA2 polypeptides that contain addition (i.e. insertion) of one or more contiguous residues at the N-terminus or the C-terminus. Such replacements can introduce a non-native glycosylation site. The modified ADA2 polypeptides can contain insertion of up to or about or 1, 2, 3, 4, 5, 6, 7, 8, 9, 10, 11, 12, 13, 14, 15, 16, 17, 18, 19, 20 or more amino acid residues at one or both of the N-terminus or C-terminus. For example, addition or insertion of amino acids can provide for altered glycosylation sites in the encoded protein. Exemplary of a modification is insertion--→N1/--→A2/--→S3 at the N-terminus, by mature numbering, with reference to the amino acid positions set forth in SEQ ID NO:5.

[0515] Exemplary of such variant ADA2 polypeptides are any set forth in any of SEQ ID NOS:274-279 and 552-560.

[0516] Also provided herein are variant ADA2 polypeptides that contain one or more amino acid replacement(s) that introduce a non-native glycosylation site, combined with other deletions, insertions, substitutions and/or amino acid replacements provided herein. For example, provided are variant ADA2 polypeptides that contain 2, 3, 4, 5, 6, 7, 8, 9, 10, 11, 12, 13, 14, 15, 16, 17, 18, 19 or 20 amino acid replacements compared to the reference ADA2 polypeptide not containing the modifications (i.e. the unmodified ADA2). Variant ADA2 polypeptides can contain any two or more amino acid replacements provided above, so long as the resulting ADA2 variant exhibits or retains adenosine deaminase activity. The two or more amino acid replacements can confer the same altered activity or a different altered activity. For example, one or more amino acid replacement(s) can introduce a non-native glycosylation site, and another amino acid replacement(s) can confer increased adenosine deaminase activity. Hence, the resulting ADA2 polypeptide variants exhibit two or more altered activities or properties.

[0517] For example, provided herein are variant ADA2 polypeptides that contain amino acid replacements R219Q/S262N/--→N1/--→A2/--→S3; R219Q/S262N/R20N/V22S; R219Q/S262N/K371N/D373S; R219Q/S262N/K372N/1374S; R219Q/S262N/T403N/H405S; R219Q/S262N/G404N/P406S; R219Q/S262N/R125N/P126A; R219Q/S262N/S127N/K129S; R219Q/S262N/P126N/E128T; R219Q/S262N/R112N/I114T; R219Q/S262N/1134N/L135C/L136T; R219Q/S262N/1134N/L135S/L136T; R219Q/S262N/R142N/Q144S; R219Q/S262N/E137N/Y139T; or R219Q/S262N/P111N/G113S, by mature numbering, with reference to amino acid residues set forth in SEQ ID NO:5.

[0518] Exemplary of such variant ADA2 polypeptides are any set forth in any of SEQ ID NOS:596-601 or 607-615, or a catalytically active portion thereof

[0519] b. Nucleic Acid Molecules

[0520] Also provided herein are nucleic acid molecules that encode any of the variant ADA2 polypeptides provided herein. A modified nucleic acid molecule that encodes any of the variant ADA2 polypeptides provided herein includes codon changes corresponding to modifications provided herein (e.g. replacement or substitution, insertion or addition, or deletion of one or more nucleotides). It is within the level of a skilled artisan, who is familiar with codons that correspond to various amino acids, to identify such codon changes based on exemplification of the modified amino acids herein. In particular examples, the nucleic acid sequence can be codon optimized, for example, to increase expression levels of the encoded sequence. The particular codon usage is dependent on the host organism in which the modified polypeptide is expressed. One of skill in the art is familiar with optimal codons for expression in mammalian or human cells, bacteria or yeast, including for example Escherichia coli or Saccharomyces cerevisiae. For example, codon usage information is available from the Codon Usage Database available at kazusa.or.jp.codon (see e.g. Richmond (2000) Genome Biology, 1:241 for a description of the database). See also, Forsburg (2004) Yeast, 10:1045-1047; Brown et al. (1991) Nucleic Acids Research, 19:4298; Sharp et al. (1988) Nucleic Acids Res., 12:8207-8211; Sharp et al. (1991) Yeast, 657-78). Vectors contain the nucleic acid molecules for expression and production of the ADA2 polypeptides are provided.

[0521] c. Production of Variant ADA2 Proteins

[0522] The variant ADA2 polypeptides and encoding nucleic acid molecules provided herein can be produced by standard recombinant DNA techniques known to one of skill in the art. Any method known in the art to effect mutation of any one or more amino acids in a target protein can be employed. Methods include standard site-directed or random mutagenesis of encoding nucleic acid molecules, or solid phase polypeptide synthesis methods. In particular, total chemical synthesis methods, including peptide synthesis followed by peptide ligation can be employed. Nucleic acid molecules encoding an ADA2 polypeptide can be subjected to mutagenesis, such as random mutagenesis of the encoding nucleic acid, error-prone PCR, site-directed mutagenesis (using e.g., a kit, such as kit such as QuikChange available from Stratagene), overlap PCR, gene shuffling, or other recombinant methods. The nucleic acid encoding the polypeptides can then be introduced into a host cell to be expressed heterologously. In some examples, the variant ADA2 polypeptides are produced synthetically, such as using total chemical synthesis, solid phase or solutions phase peptide synthesis.

[0523] Exemplary methods for producing and expressing a nucleic acid molecule encoding an ADA2 polypeptide, including any variant ADA2 polypeptide, are described in Section E. Depending on how the variant ADA2 molecule is produced, or the particular nature of the modification(s), the variant ADA2 polypeptides provided herein can be produced as a monomer, dimer, or other multimer. For example, the variant ADA2 is a heterodimer or homodimer.

[0524] In particular, ADA2 normally exists as a homodimer that is composed of two identical polypeptide chains. As described above, nonpolar interactions between residues of two identical polypeptide subunits mediate formation of the homodimer upon secretion of ADA2 from cells. Since wildtype ADA2 is a homodimer, it is understood that mention of an amino acid sequence of the reference or unmodified ADA2 polypeptide refers to the sequence of amino acids of a single ADA2 polypeptide subunit. The variant ADA2 can contain one or more ADA2 polypeptide subunits, that are the same (i.e. homodimer) or different (i.e. heterodimer). For example, a variant ADA2 homodimer is readily produced and secreted by cells transformed with a nucleic acid molecule encoding a variant ADA2 polypeptide, such as nucleic acid encoding a polypeptide that has the sequence of amino acids set forth in any of SEQ ID NOS: 13-63, 71-285 or 552-931, or a catalytically active fragment thereof. If cells are encoded with two or more different nucleic acid molecules, each encoding a different ADA2 polypeptide, a heterodimer can be produced.

[0525] In one example, the variant ADA2 polypeptide provided herein is a dimer. For example, the resulting variant ADA2 polypeptide is a homodimer that contains a first and second polypeptide subunit that are the same, i.e. each has the same amino acid sequence containing the identical modification(s) with respect to the amino acid sequence of the reference or unmodified ADA2 polypeptide. The homodimer can be formed by transforming a nucleic acid molecule encoding the variant polypeptide into a cell, which, upon secretion, results in nonpolar interaction between residues of two variant polypeptide subunits to mediate formation of the dimer.

[0526] In another example, the resulting ADA2 polypeptide is a heterodimer that contains a first and second polypeptide subunit that are different. In such an example, one or both of the first or second polypeptide subunit contains a sequence of amino acids containing a modification(s) with respect to the amino acid sequence of the reference or unmodified ADA2 polypeptide. In some cases, both the first and second polypeptide subunit can contain a sequence of amino acids containing a modification(s) compared to the reference of unmodified ADA2 polypeptide, but the nature of the modification(s) are different. The heterodimer can be formed by transforming into a cell both a first nucleic acid molecule encoding a first variant polypeptide subunit and a second nucleic acid molecule encoding a second different polypeptide subunit. The second nucleic acid molecule can encode a polypeptide subunit containing the sequence of amino acids of the reference or wildtype ADA2, or can encode a variant polypeptide subunit containing a sequence of amino acids containing modification(s) with respect to the amino acid sequence of the reference or unmodified ADA2. The heterodimer is produced upon expression and secretion from a cell as a result of nonpolar interaction between residues of the two polypeptide subunits to mediate formation of the dimer. In such processes, generally a mixture of dimeric molecules is formed, including homodimers and heterodimers. For the generation of heterodimers, additional steps for purification can be necessary. For example, the first and second polypeptide can be engineered to include a tag with metal chelates or other epitope, where the tags are different. The tagged domains can be used for rapid purification by metal-chelate chromatography, and/or by antibodies, to allow for detection by western blots, immunoprecipitation, or activity depletion/blocking in bioassays.

[0527] In other examples, the variant ADA2 polypeptide is a monomer. A monomer can be produced by mutation of one or more residues that are involved in protein dimerization, so long as the adenosine deaminase activity is retained. Exemplary of residues that can be targeted for mutagenesis include, but are not limited to, amino acid residues 1, 4, 5, 8, 9, 11, 12, 15, 344, 362 or 366, with reference to amino acid residues set forth in SEQ ID NO:5. The residues can be replaced with one of the other nineteen amino acid residues at the position. It is within the level of a skilled artisan to generate and assess monomer formation of a polypeptide. For example, monomer formation can be assessed, and monomers purified, by size-exclusion chromatography (SEC). Adenosine deaminase activity also can be assessed, such as using any of the assays described herein or known in the art.

[0528] In some examples, dimeric or other multimeric molecules of a variant ADA2 can be formed by conjugation or fusion of the encoded variant ADA2 polypeptide to any moiety or other polypeptide that are themselves able to interact to form a stable structure. For example, separate encoded ADA2 polypeptides, where at least one is a variant ADA2 polypeptide, can be joined by multimerization, whereby multimerization of the polypeptides is mediated by a multimerization domain. The variant ADA2 dimers or multimers can be formed by generation of a chimeric molecule where a variant ADA2 is linked, directly or indirectly, to a multimerization domain. A nucleic acid molecule encoding a variant ADA2 can be joined (directly or indirectly) with a nucleic acid encoding a multimerization domain. For example, a variant ADA2 dimer provided herein can contain a first ADA2 polypeptide subunit linked directly or indirectly via a linker to a multimerization domain and a second ADA2 polypeptide subunit linked directly or indirectly via a linker to a multimerization domain, wherein one or both of the first and second polypeptide are a variant ADA2 polypeptide. The first and second ADA2 polypeptide can be the same or different. Exemplary of a multimerization domain is an Fc domain, which is described further below.

[0529] Homo- or heteromultimeric polypeptides can be generated from co-expression of separate nucleic acid molecules encoding ADA2 polypeptides. Chimeric ADA2 polypeptides can be readily produced and secreted by cells, such as mammalian cells, transformed with the appropriate nucleic acid molecule. For example, a cell can be transformed with a first nucleic acid molecule encoding a variant ADA2 and a second nucleic acid molecule encoding the same or different ADA2. The second nucleic acid molecule can encode a polypeptide subunit containing the sequence of amino acids of the reference or wildtype ADA2, or can encode a variant polypeptide subunit containing a sequence of amino acids containing modification(s) with respect to the amino acid sequence of the reference or unmodified ADA2. The secreted forms of the ADA2 polypeptide include those where the variant ADA2 is a homodimer of the first encoded variant ADA2 polypeptide, a homodimer of the second encoded ADA2 polypeptide, such as wildtype or second variant ADA2 polypeptide, and ADA2 heterodimers containing two polypeptide subunits that are different. In some cases, higher ordered multimers can form.

[0530] Multimerization domains are well known to a skilled artisan. Generally, a multimerization domain includes any capable of forming a stable protein-protein interaction. The multimerization domains can interact via an immunoglobulin sequence (e.g. Fc domain; see e.g., International Patent Pub. Nos. WO 93/10151 and WO 2005/063816; U.S. Pub. No. 2006/0024298; U.S. Pat. No. 5,457,035), leucine zipper (e.g. from nuclear transforming proteins fos and jun or the proto-oncogene c-myc or from General Control of Nitrogen (GCN4)), a hydrophobic region, a hydrophilic region, or a free thiol which forms an intermolecular disulfide bond between the chimeric molecules of a homo- or heteromultimer. In addition, a multimerization domain can include an amino acid sequence containing a protuberance complementary to an amino acid sequence comprising a hole, such as is described, for example, in U.S. Pat. No. 5,731,168; International Patent Pub. Nos. WO 98/50431 and WO 2005/063816; Ridgway et al. (1996) Protein Engineering, 9:617-621. Such a multimerization region can be engineered such that steric interactions not only promote stable interaction, but further promote the formation of heterodimers over homodimers from a mixture of chimeric monomers. Generally, protuberances are constructed by replacing small amino acid side chains from the interface of the first polypeptide with larger side chains (e.g., tyrosine or tryptophan). Compensatory cavities of identical or similar size to the protuberances are optionally created on the interface of the second polypeptide by replacing large amino acid side chains with smaller ones (e.g., alanine orthreonine).

[0531] An ADA2 polypeptide, such as any variant ADA2 polypeptide provided herein, can be joined anywhere, but typically via its N- or C-terminus, to the N- or C-terminus of a multimerization domain to form a chimeric polypeptide. The linkage can be direct or indirect via a linker. Also, the chimeric polypeptide can be a fusion protein or can be formed by chemical linkage, such as through covalent or non-covalent interactions. For example, when preparing a chimeric polypeptide containing a multimerization domain, nucleic acid encoding an ADA2 polypeptide can be operably linked to nucleic acid encoding the multimerization domain sequence, directly or indirectly or optionally via a linker domain. The construct can encode a chimeric protein where the C-terminus of the ADA2 polypeptide is joined to the N-terminus of the multimerization domain. In some instances, a construct can encode a chimeric protein where the N-terminus of the ADA2 polypeptide is joined to the N- or C-terminus of the multimerization domain.

[0532] In examples where the multimerization domain is a polypeptide, a gene fusion encoding the ADA2-multimerization domain chimeric polypeptide is inserted into an appropriate expression vector. The resulting ADA2-multimerization domain chimeric proteins can be expressed in host cells transformed with the recombinant expression vector, and allowed to assemble into multimers, where the multimerization domains interact to form multivalent polypeptides. Chemical linkage of multimerization domains to ADA2 polypeptides can also be effected using heterobifunctional linkers.

[0533] The resulting chimeric polypeptides, and multimers formed therefrom, can be purified by any suitable method such as, for example, by affinity chromatography over Protein A or Protein G columns. Where two nucleic acid molecules encoding different ADA2 chimeric polypeptides are transformed into cells, formation of homo- and heterodimers will occur. Conditions for expression can be adjusted so that heterodimer formation is favored over homodimer formation. For example, for multimers formed by interaction of disulfide-linkage of an Fc multimerization domain, homodimers can be reduced under conditions that favor the disruption of inter-chain disulfides, but do not affect intra-chain disulfides. Alternatively, the formation of this type of heterodimer can be biased by genetically engineering and expressing ADA2 fusion molecules using a multimerization domain that promotes formation of heterodimers, such as using a c-jun and c-fos leucine zipper combination. Since the leucine zippers form predominantly heterodimers, they can be used to drive the formation of the heterodimers when desired. The ADA2 polypeptides contain an Fc region or other multimerization domain also can be engineered to include a tag to permit purification of desired heterodimers. The products of the nuclear oncogenesfos and jun contain leucine zipper domains that preferentially form a heterodimer (O'Shea et al. (1989) Science, 245:646; Turner and Tijian (1989) Science, 243:1689). For example, the leucine zipper domains of the human transcription factors c-jun and c-fos have been shown to form stable heterodimers with a 1:1 stoichiometry (see e.g., Busch and Sassone-Corsi (1990) Trends Genetics, 6:36-40; Gentz et al. (1989) Science, 243:1695-1699). Although jun-jun homodimers also have been shown to form, they are about 1000-fold less stable than jun-fos heterodimers.

### D. ADA2 CONJUGATES AND FUSION PROTEINS

[0534] Any ADA2 molecule, including any provided herein, can be conjugated, directly or indirectly, to one or more heterologous moiety. The ADA2 can be a wildtype ADA2, including allelic and species variants, or can be any variant described herein in Section C.2. above. The ADA2 molecule in the conjugate can be a monomer or a dimer, for example, a heterodimer or a homodimer. Typically, the ADA2 in the conjugate is a homodimer. The heterologous moiety can be conjugated to one or both polypeptide subunits of the dimer.

[0535] For example, the ADA2 can be any that contains a polypeptide having the sequence of amino acids set forth in any of SEQ ID NOS:5 or 326-336, 338-342, 375 or 380-383, or a sequence of amino acids that exhibits at least 85%, 86%, 87%, 88%, 89%, 90%, 91%, 92%, 93%, 94%, 95%, 96%, 97%, 98%, 99% or more sequence identity to any of SEQ ID NOS:5 or 326-336, 338-342, 375 or 380-383, or a catalytically active fragment thereof. In one example, the ADA2 in the conjugate provided herein can contain a polypeptide having the sequence of amino acids set forth in any of SEQ ID NOS:5 or 326-336, 338-342, 375 or 380-383 or a catalytically active fragment thereof, such as any of SEQ ID NOS:5, 326-334, 340, 375 or 380-383, or a catalytically active fragment thereof. For example, the ADA2 in the conjugate provided herein can contain a polypeptide having the sequence of amino acids set forth in SEQ ID NO:5, or a catalytically active portion thereof. The catalytically active portion can be one that lacks all or a portion of the PRB domain, such as those set forth in any of SEQ ID NOS:548-550 or 579.

[0536] In other examples of conjugates provided herein, the conjugate contains a variant ADA2 polypeptide, such as any described herein. For example, conjugates provided herein can be an ADA2 that contains the variant polypeptide set forth in any of SEQ ID NOS: 13-63, 71-285 or 552-931.

[0537] The heterologous moiety can include protein or polypeptide moieties or non-polypeptide moieties. For example, the heterologous moiety can be, but is not limited to, a peptide, small molecule, nucleic acid, carbohydrate and polymer. The heterologous moiety can be linked, directly or indirectly, to the ADA2 protein molecule. For example, the heterologous moiety can be a protein or polypeptide moiety, which can be directly or indirectly conjugated to the ADA2 polypeptide, or produced as fusion proteins that are directly or indirectly fused. In other cases, the heterologous moiety is a non-peptide moiety that is conjugated to the ADA2 molecules.

[0538] The ADA2 protein can be conjugated to one or more heterologous moieties, such as 1, 2, 3, 4, 5, 6, 7, 8, 9, 10 or more heterologous moieties. A heterologous moiety can be a heterologous polypeptide moiety, or a heterologous non-polypeptide moiety, or both. In other examples, the heterologous moieties can include a combination of a heterologous polypeptide and a non-polypeptide moiety. In some examples, all the heterologous moieties are identical. In some examples, at least one heterologous moiety is different from the other heterologous moieties. In some examples, any ADA2 provided herein can be conjugated to two, three or more than three heterologous moieties in tandem. In other examples, any ADA2 provided herein can be conjugated to two, three, or more heterologous moieties wherein at least an additional moiety is interposed between two heterologous moieties (e.g., an ADA2 polypeptide, a linker, a protease-cleavable substrate, a self-immolative spacer, or combinations thereof).

[0539] Conjugation with heterologous moieties can confer beneficial properties compared to an ADA2 molecule that is not conjugated with the heterologous moiety. Exemplary heterologous moieties are moieties that increase the in vivo half-life of the molecule. Other exemplary beneficial properties provided by a heterologous moiety include, but are not limited to, increased protein expression in mammalian expression systems, improved biophysical properties such as stability and solubility, improved protein purification and detection, visualization and localization and/or increased enzymatic activity. For example, a heterologous moiety can be one that facilitates detection, visualization or localization of an ADA2 protein molecule or a fragment thereof containing the heterologous moiety. Detection, visualization and/or location of any ADA2 fragment thereof can be in vivo, in vitro, ex vivo, or combinations thereof.

[0540] In some cases, when conjugated to an ADA2 or fragment thereof, the heterologous moiety increases stability of the ADA2 or a fragment thereof. For example, the presence of the heterologous moiety can maintain one or more physical properties of an ADA2 in response to an environmental condition (e.g., an elevated temperature or low or high pH conditions) compared to the physical property in the absence of the heterologous moiety. In some examples, the physical property can include maintenance of the covalent structure of an ADA2 (e.g., the absence of proteolytic cleavage, unwanted oxidation or deamidation). In other examples, the physical property can be the maintenance of a properly folded state (e.g., the absence of soluble or insoluble aggregates or precipitates). The stability of any ADA2 or ADA2 conjugate can be measured by assaying a biophysical property of the protein, for example thermal stability, pH unfolding profile, stable removal of glycosylation, solubility, biochemical function (e.g. adenosine deaminase activity or heparin binding activity) and/or combinations thereof. Stability can be measured using methods known in the art, such as, HPLC (high performance liquid chromatography), SEC (size exclusion chromatography), DLS (dynamic light scattering). Methods to measure thermal stability include, but are not limited to differential scanning calorimetry (DSC), differential scanning fluorimetry (DSF), circular dichroism (CD), and thermal challenge assay. Exemplary methods to assess the stability of any ADA2 or conjugate are described below in Section F.

[0541] In some examples, when conjugated to an ADA2 or fragment thereof, the presence of the heterologous moiety reduces or attenuates binding of ADA2 to heparin and other glycosaminoglycans (GAGs) compared to the ADA2 protein not containing the heterologous moiety (i.e. the free or non-conjugated ADA2). For example, ADA2 conjugates provided herein include those that exhibit no more than 1%, 2%, 3%, 4%, 5%, 6%, 7%, 8%, 9%, 10%, 15%, 20%, 25%, 30%, 35%, 40%, 45%, 50%, 55%, 60%, 65%, 70%, 75%, 80%, 85%, 90%, or 95% of the heparin binding of the ADA2 protein not containing the heterologous moiety (i.e. the free or non-conjugated ADA2). For example, it is shown herein that PEGylated ADA2 exhibits reduced heparin binding compared to the corresponding non-PEGylated ADA2 (see e.g. Example 8). Typically, the heparin binding is exhibited when the ADA2 is in dimer form, and the ADA2 conjugate is a dimer. It also is understood the comparison of binding between the conjugated and non-conjugated form is assessed under the same or substantially the same conditions. In particular, the reduction in binding in the presence of the heterologous moiety in the conjugate can be due to steric blockage and/or alteration of electrostatic charges on the surface.

[0542] In examples of conjugates provided herein, the heterologous moiety improves one or more properties of the ADA2 (e.g. half-life) without substantially affecting the biological activity or function of the ADA2 protein (e.g., adenosine deaminase activity). For example, ADA2 conjugates provided herein exhibit about 50% to 500%, such as about 50% to 400%, 50% to 300%, 50% to 200%, 50% to 150%, 50% to 100%, 50% to 80%, 80% to 400%, 80% to 300%, 80% to 200%, 80% to 150%, 80% to 100%, 100% to 400%, 100% to 300%, 100% to 200% or 100% to 150% of the adenosine deaminase activity compared to the ADA2 protein not containing the heterologous moiety (i.e. the free or non-conjugated ADA2). For example, the ADA2 conjugate can exhibit at least 50%, 60%, 70%, 75%, 80%, 85%, 90%, 95%, 100%, 110%, 120%, 130%, 140%, 150%, 160%, 170%, 180%, 190%, 200%, 210%, 220%, 230%, 240%, 250%, 260%, 270%, 280%, 290%, 300%, 350%, 400%, 450%, 500% or more of the adenosine deaminase activity compared to the ADA2 polypeptide not containing the heterologous moiety (i.e. the free or non-conjugated ADA2). In some cases, ADA2 conjugates provided herein exhibit increased or improved adenosine deaminase activity compared to the ADA2 polypeptide not containing the heterologous moiety (i.e. the free or non-conjugated ADA2), such as greater than 100% or more adenosine deaminase activity. Typically, the adenosine deaminase activity is exhibited when the ADA2 is in dimer form, and the ADA2 conjugate is a dimer. It also is understood the comparison of adenosine binding between the conjugated and non-conjugated form is assessed under the same or substantially the same conditions.

[0543] 1. Half-Life Extending Moieties

[0544] Non-limiting examples of heterologous moieties include any that, when conjugated or linked (directly or indirectly) to the ADA2 molecule, confers an increase in the in vivo and/or in vitro half-life compared to the free- or non-conjugated ADA2. Half-life of any ADA2 provided herein can be determined by any method known to those of skill in the art and/or described herein, e.g., adenosine deaminase activity assays. Exemplary of such half-life extending moieties are described in the following subsections.

[0545] For example, the heterologous moieties are peptides and polypeptides with either unstructured or structured characteristics that are associated with the prolongation of in vivo half-life when conjugated to an ADA2. Non-limiting examples include albumin, albumin fragments, Fc fragments of immunoglobulins, the p subunit of the C-terminal peptide (CTP) of the p subunit of human chorionic gonadotropin, HAP sequences, XTEN sequences, a transferrin or a fragment thereof, a PAS polypeptide, polyglycine linkers, polyserine linkers, albumin-binding moieties, non-natural amino acid based conjugation or half-life extension, or any fragments, derivatives, variants, or combinations of these polypeptides.

[0546] The heterologous moiety can be a half-life extending moiety, i.e., a heterologous moiety that increases the in vivo half-life of any ADA2 provided herein compared to the in vivo half-life of the ADA2 lacking such heterologous moiety. In vivo half-life of any ADA2 provided herein can be determined by any method known to those of skill in the art and/or described herein, e.g., adenosine deaminase activity assays.

[0547] Exemplary half-life extending moieties that can be conjugated, directly or indirectly, to any ADA2 provided herein include: biocompatible fatty acids and derivatives thereof, hydroxy alkyl starch (HAS) (e.g. hydroxy ethyl starch (HES)), polyethylene glycol (PEG), Poly (Glyₓ-Ser_{y})ₙ, homo-amino-acid polymers (HAP), hyaluronic acid (HA), heparosan polymers (HEP), phosphorylcholine-based polymers (PC polymer), Fleximers, dextran, polysialic acids (PSA), Fc domain, Transferrin, Albumin, elastin-like peptides, XTEN sequences, albumin binding peptides, a CTP peptide, a non-natural amino acid or non-natural amino acid conjugate, and any combination thereof.

[0548] In some example, when conjugated to an ADA2 or fragment thereof, the presence of one or more half-life extending moieties results in the half-life of any ADA2 provided herein to be increased compared to the half-life of the ADA2 lacking such one or more half-life extending moieties (i.e. the free or non-conjugated ADA2). For example, ADA2 conjugates provided herein exhibit a half-life that is at least about 110%, 120%, 130%, 140%, 150%, 160%, 170%, 180%, 190%, 200%, 225%, 250%, 300%, 350%, 400%, 450%, 500%, 600%, 700%, 800% or more longer than the half-life of ADA2 polypeptide not containing the heterologous moiety (i.e. the free or non-conjugated ADA2), or 900%, 1000%, 1100%, 1200%, 1300%, 1400%, 1500%, 1600%, 1700%, 1800%, 1900%, 2000%, 3000%, 4000%, 5000%, 6000%, 7000%, 8000%, 9000%, 10000%, or more longer than the half-life of ADA2 polypeptide not containing the heterologous moiety (i.e. the free or non-conjugated ADA2). In some examples, the half-life of any ADA2 conjugate provided herein that is linked, directly or indirectly, to a half-life extending moiety exhibits a half-life that is about 1.5-fold to about 20-fold, about 1.5-fold to about 15-fold, about 1.5-fold to about 10-fold longer, about 2-fold to about 10-fold, about 2-fold to about 9-fold, about 2-fold to about 8-fold, about 2-fold to about 7-fold, about 2-fold to about 6-fold, about 2-fold to about 5-fold, about 2-fold to about 4-fold, about 2-fold to about 3-fold, about 2.5-fold to about 10-fold, about 2.5-fold to about 9-fold, about 2.5-fold to about 8-fold, about 2.5-fold to about 7-fold, about 2.5-fold to about 6-fold, about 2.5-fold to about 5-fold, about 2.5-fold to about 4-fold, about 2.5-fold to about 3-fold, about 3-fold to about 10-fold, about 3-fold to about 9-fold, about 3-fold to about 8-fold, about 3-fold to about 7-fold, about 3-fold to about 6-fold, about 3-fold to about 5-fold, about 3-fold to about 4-fold, about 4-fold to about 6 fold, about 5-fold to about 7-fold, or about 6-fold to about 8-fold longer than the half-life of the corresponding ADA2 lacking such half-life extending moiety. Typically, the half-life for activity in vivo is exhibited when the ADA2 is in dimer form, and the ADA2 conjugate is a dimer. It also is understood the comparison of half-life between the conjugated and non-conjugated form is assessed under the same or substantially the same conditions.

[0549] In some examples, the half-life of any ADA2 conjugate provided herein that is linked, directly or indirectly, to a half-life extending moiety can be or is at least or at least about 10 hours, 11 hours, 12 hours, 13 hours, 14 hours, 15 hours, 16 hours, 17 hours, 18 hours, 19 hours, 20 hours, 21 hours, 22 hours, 23 hours, 24 hours, 25 hours, 26 hours, 27 hours, 28 hours, 29 hours, 30 hours, 32 hours, 34 hours, 36 hours, 38 hours, 40 hours, 42 hours, 46 hours, 48 hours, 50 hours, 55 hours, 60 hours, 65 hours, 70 hours, 75 hours, 80 hours or more. For example, the half-life of any ADA2 conjugate provided herein can be 10 hours to 60 hours, such as 12 hours to 48 hours or 13 hours to 36 hours. For example, Example 9 shows that an ADA2 conjugate that is a PEGylated ADA2 exhibits a half-life of about or approximately 12 to 14 hours, and PEGylated variant ADA2 molecules (e.g. R20E or K371D) exhibit an even greater half-life of about or approximately 16 hours to 24 hours. Example 14 shows that other PEGylated variant ADA2 molecules (e.g. R219Q/S262N) exhibit an even greater half-life of about or approximately 39 hours to 47 hours.

[0550] The following sub-sections describe exemplary half-life extending moieties in the ADA2 conjugates provided herein.

[0551] a. Low Complexity Polypeptides

[0552] An ADA2 conjugate provided herein can include an ADA2 that is linked, directly or indirectly, to at least one heterologous moiety that is a polypeptide with low compositional and/or structural complexity (e.g., a disordered polypeptide with no secondary or tertiary structure in solution under physiologic conditions). In one example, the low complexity polypeptide sequences are made of unstructured, hydrophilic amino acid polymers. The low complexity polypeptides can provide beneficial properties, for example, if the protein is subjected to higher temperature or harsh conditions, such as HPLC purification.

[0553] b. C-Terminal Peptide (CTP) of the p Subunit of Human Chorionic Gonadotropin

[0554] An ADA2 conjugate provided herein can include an ADA2 that is linked, directly or indirectly, to a heterologous moiety that includes one C-terminal peptide (CTP) of the p subunit of human chorionic gonadotropin, or fragment, variant, or derivative thereof. One or more CTP peptides inserted into a recombinant protein is known to increase the in vivo half-life of that protein (see, e.g., U.S. Pat. No. 5,712,122). Exemplary CTP peptides include DPRFQDSSSSKAPPPSLPSPSRLPGPSDTPIL (SEQ ID NO:303) or SSSSKAPPPSLPSPSRLPGPSDTPILPQ. (SEQ ID NO:304) (See, e.g., U.S. Patent Publication No. US 2009/0087411).

[0555] c. Immunoglobulin Constant Region (Fc) or Portions Thereof

[0556] An ADA2 conjugate provided herein can include an ADA2 that is linked, directly or indirectly, to an Fc domain or variant thereof. Fc domains, fragments, variants, and derivatives are known to one of skill in the art and are described, e.g., in U.S. Pat. No. 5,457,035; U.S. Patent Publication No. US 2006/0024298, International PCT Publication Nos. WO 2011/069164, WO 2012/006623, WO 2012/006635, or WO 2012/006633, each of which is incorporated by reference herein in its entirety. Preparations of fusion proteins containing polypeptides fused to various portions of antibody-derived polypeptides (including the Fc domain) has been described, see e.g., Ashkenazi et al. (1991) PNAS 88: 10535; Byrn et al. (1990) Nature, 344:667; and Hollenbaugh and Aruffo, (2002) “Construction of Immunoglobulin Fusion Proteins,” in Current Protocols in Immunology, Ch. 10, pp. 10.19.1-10.19.11.

[0557] An Fc region has domains denoted C_{H} (constant heavy) domains (C_{H}1, C_{H}2, C_{H}3 (optionally C_{H}4)). Depending on the isotype, (i.e. IgG, IgM, IgA IgD or IgE), the Fc region can have three or four CH domains. Some isotypes (e.g. IgG) Fc regions also contain a hinge region (see Janeway et al. 2001, Immunobiology, Garland Publishing, N.Y., N.Y). In humans, there are five antibody isotypes classified based on their heavy chains denoted as delta (6), gamma (γ), mu (μ), and alpha (α) and epsilon (ε), giving rise to the IgD, IgG, IgM, IgA, and IgE classes of antibodies, respectively. The IgA and IgG classes contain the subclasses IgA1, IgA2, IgG1, IgG2, IgG3, and IgG4. Sequence differences between immunoglobulin heavy chains cause the various isotypes to differ in, for example, the number of C domains, the presence of a hinge region, and the number and location of interchain disulfide bonds. For example, IgM and IgE heavy chains contain an extra C domain (C_{H}4), that replaces the hinge region. The Fc regions of IgG, IgD, and IgA pair with each other through their Cγ3, Cδ3, and Cα3 domains, whereas the Fc regions of IgM and IgE dimerize through their Cμ4 and Cε4 domains. IgM and IgA form multimeric structures with ten and four antigen-binding sites, respectively.

[0558] Fc regions are known to a skilled artisan, and any can be used in the conjugates provided herein so long as the resulting conjugate retains adenosine deaminase activity. An Fc region or a portion thereof for producing any ADA2 provided herein can be obtained from a number of different sources. In some examples, an Fc region or a portion thereof is derived from a human immunoglobulin. The Fc region or a portion thereof can also be derived from an immunoglobulin of another mammalian species, including for example, a rodent (e.g. a mouse, rat, rabbit, guinea pig) or non-human primate (e.g. chimpanzee, macaque) species. Moreover, the Fc region or a portion thereof can be derived from any immunoglobulin class, including IgG (including human subclasses IgG1, IgG2, IgG3, or IgG4), IgA (including human subclasses IgA1 and IgA2), IgD, IgE, and IgM. In one example, the human isotype IgG1 is used. An ADA2 provided herein that is conjugated to an Fc region of an immunoglobulin can confer several desirable properties including increased stability, increased serum half-life (see Capon et al. (1989) Nature 337:525) as well as binding to Fc receptors such as the neonatal Fc receptor (FcRn) (U.S. Pat. Nos. 6,086,875, 6,485,726, 6,030,613; WO 03/077834; US 2003/0235536, each of which is incorporated by reference herein in its entirety.). In other examples, where effector functions mediated by the Fc-Fc receptor (FcR) interactions are to be minimized, fusion with IgG isotypes that poorly recruit complement or effector cells, such as for example, the Fc of IgG2 or IgG4, is contemplated. Further, linkers can be used to covalently link Fc to another polypeptide to generate a Fc chimera.

[0559] Exemplary sequences of heavy chain constant regions for human IgG sub-types are set forth in SEQ ID NO:355 (IgG1), SEQ ID NO:356 (IgG2), SEQ ID NO:357 (IgG3), and SEQ ID NO:358 (IgG4). For example, for the exemplary heavy chain constant region set forth in SEQ ID NO:355, the C_{H}1 domain corresponds to amino acids 1-98, the hinge region corresponds to amino acids 99-110, the C_{H}2 domain corresponds to amino acids 111-223, and the C_{H}3 domain corresponds to amino acids 224-330.

[0560] Modified Fe domains also are contemplated herein for conjugation to any ADA2 provided herein. In some examples, the Fe region is modified such that it exhibits altered binding to an FcR to result in altered (i.e. more or less) effector function compared to the effector function of an Fc region of a wild-type immunoglobulin heavy chain. Thus, a modified Fc domain can have altered affinity, including but not limited to, increased or low or no affinity for the Fc receptor. For example, the different IgG subclasses have different affinities for the Fcγ receptors (FcγRs), with IgG1 and IgG3 typically binding substantially better to the receptors than IgG2 and IgG4. In addition, different FcγRs mediate different effector functions. FcγR1, FcγRIIa/c, and FcγRIIIa are positive regulators of immune complex triggered activation, characterized by having an intracellular domain that has an immunoreceptor tyrosine-based activation motif (ITAM). FcγRIIb, however, has an immunoreceptor tyrosine-based inhibition motif (ITIM) and is therefore inhibitory. In some instances, an ADA2 conjugate including an Fc domain provided herein can be modified to enhance binding to the complement protein C1q.

[0561] In certain examples, Fc region for conjugation to any ADA2 provided herein can include one or more truncated Fc regions that are nonetheless sufficient to confer Fc receptor (FcR) binding properties to the Fc region. For example, the portion of an Fc region that binds to FcRn (i.e., the FcRn binding portion) can include from about amino acids 282-438 of IgG1, with the primary contact sites being amino acids 248, 250-257, 272, 285, 288, 290-291, 308-311, and 314 of the C_{H}2 domain and amino acid residues 385-387, 428, and 433-436 of the C_{H}3 domain (amino acid numbering based on the EU numbering system; see Edelman et al. (1969) PNAS 63:78-85 and Kabat et al. (1991) Sequences of Proteins of Immunological Interest, Fifth Edition, U.S. Department of Health and Human Services, NIH Publication No. 91-3242). Thus, an Fc region in any ADA2 provided herein can include an FcRn binding portion. FcRn binding portions can be derived from heavy chains of any isotype, including IgG1, IgG2, IgG3 and IgG4. Altering the affinity of an Fc region for a receptor can modulate the effector functions and/or pharmacokinetic properties associated by the Fc domain. Modified Fc domains are known to one of skill in the art and described in the literature, see e.g. U.S. Pat. No. 5,457,035; U.S. Patent Publication No. US 2006/0024298; and International Patent Publication No. WO 2005/063816 for exemplary modifications.

[0562] In certain examples, an Fc region for conjugation to any ADA2 provided herein can include at least one of: a hinge (e.g., upper, middle, and/or lower hinge region) domain (about amino acids 216-230 of an antibody Fc region based on EU numbering), a C_{H}2 domain (about amino acids 231-340 of an antibody Fc region based on EU numbering), a C_{H}3 domain (about amino acids 341-438 of an antibody Fc region based on EU numbering), a C_{H}4 domain, or a variant, portion, or fragment thereof. In other examples, an Fc region can include a complete Fc domain (i.e., a hinge domain, a C_{H}2 domain, and a C_{H}3 domain). In some examples, an Fc region can include, a hinge domain (or a portion thereof) fused to a C_{H}3 domain (or a portion thereof), a hinge domain (or a portion thereof) fused to a C_{H}2 domain (or a portion thereof), a C_{H}2 domain (or a portion thereof) fused to a C_{H}3 domain (or a portion thereof), a C_{H}2 domain (or a portion thereof) fused to both a hinge domain (or a portion thereof) and a C_{H} domain (or a portion thereof). In still other examples, an Fc region lacks at least a portion of a C_{H}2 domain (e.g., all or part of a C_{H}2 domain). In a particular example, an Fc region can include amino acids corresponding 221 to 447 (based on the EU numbering system; see Edelman et al. (1969) PNAS 63:78-85 and Kabat et al. (1991) Sequences of Proteins of Immunological Interest, Fifth Edition, U.S. Department of Health and Human Services, NIH Publication No. 91-3242)

[0563] An Fc region for conjugation to any ADA2 provided herein can include, for example, a modification (e.g., an amino acid substitution) at one or more of the amino acid positions disclosed in International. PCT Pub. Nos. WO88/07089, WO96/14339, WO98/05787, WO98/23289, WO99/51642, WO99/58572, WO00/09560, WO00/32767, WO00/42072, WO02/44215, WO02/060919, WO03/074569, WO04/016750, WO04/029207, WO04/035752, WO04/063351, WO04/074455, WO04/099249, WO05/040217, WO04/044859, WO05/070963, WO05/077981, WO05/092925, WO05/123780, WO06/019447, WO06/047350, and WO06/085967; U.S. Pat. Publ. Nos. US 2007/0231329, US2007/0231329, US2007/0237765, US2007/0237766, US2007/0237767, US2007/0243188, US2007/0248603, US2007/0286859, US2008/0057056; or U.S. Pat. Nos. 5,648,260; 5,739,277; 5,834,250; 5,869,046; 6,096,871; 6,121,022; 6,194,551; 6,242,195; 6,277,375; 6,528,624; 6,538,124; 6,737,056; 6,821,505; 6,998,253; 7,083,784; 7,404,956; and 7,317,091, each of which is incorporated by reference herein in its entirety. In one example, the specific modification (e.g., the specific substitution of one or more amino acids disclosed in the art) can be made at one or more of the disclosed amino acid positions. In another example, a different change at one or more of the disclosed amino acid positions (e.g., the different substitution of one or more amino acid position disclosed in the art) can be made.

[0564] In some examples, any ADA2 provided herein can be conjugated to at least one Fc region as a fusion protein. Typically, such a fusion retains at least a functionally active hinge, C_{H}2 and C_{H}3 domains of the constant region of an immunoglobulin heavy chain. For example, a full-length Fc sequence of IgG1 includes amino acids 99-330 of the sequence set forth in SEQ ID NO:355. An exemplary Fc sequence for hIgG1 is set forth in SEQ ID NO:359, and contains almost all of the hinge sequence, and the complete sequence for the C_{H}2 and C_{H}3 domain as set forth in SEQ ID NO:355. Another exemplary Fc polypeptide is the Fc polypeptide set forth in SEQ ID NO:361. Another exemplary Fc polypeptide is set forth in PCT Pub. No. WO 93/10151, and is a single chain polypeptide extending from the N-terminal hinge region to the native C-terminus of the Fc region of a human IgG1 antibody (SEQ ID NO:359). The precise site at which the linkage is made is not critical: particular sites are well known and can be selected in order to optimize the biological activity, secretion, or binding characteristics of the ADA2 protein molecule. For example, other exemplary Fc polypeptide sequences begin at amino acid C109 or P113 of the sequence set forth in SEQ ID NO:355 (see e.g., U.S. Pub. No. 2006/0024298).

[0565] An Fc region for conjugation to any ADA2 provided herein can also contain amino acid substitution which alters the glycosylation of the chimeric protein known in the art. For example, the Fc region of any ADA2 provided herein can be conjugated to an Fc region having a mutation leading to reduced glycosylation (e.g., N- or O-linked glycosylation) or to an altered glycoform of the wild-type Fc moiety (e.g., a low fucose or fucose-free glycan).

[0566] An Fc region for conjugation to any ADA2 provided herein also can be engineered to include a tag with metal chelates or other epitope. The tagged domain can be used for rapid purification by metal-chelate chromatography, and/or by antibodies, to allow by detection of western blots, immunoprecipitation, or activity depletion/blocking in bioassays.

[0567] d. Albumin or Fragment, or Variant Thereof

[0568] An ADA2 conjugate provided herein can include an ADA2 that is linked, directly or indirectly, to a heterologous moiety that includes albumin or a functional fragment thereof. Human serum albumin (HSA, or HA), a protein of 609 amino acids in its full-length form (exemplary sequence set forth in SEQ ID NO:305), is responsible for a significant proportion of the osmotic pressure of serum and also functions as a carrier of endogenous and exogenous ligands. Albumin can be a full-length albumin or a functional fragment, variant, derivative, or analog thereof. Examples of albumin or the fragments or variants thereof are disclosed in US Pat. Publ. Nos. 2008/0194481, 2008/0004206, 2008/0161243, 2008/0261877, or 2008/0153751 or PCT Publ. Nos. 2008/033413, 2009/058322, or 2007/021494, each of which is incorporated by reference herein in its entirety.

[0569] In some examples, any ADA2 provided herein can include albumin, a fragment, or a variant thereof which is further linked to a heterologous moiety selected from an immunoglobulin constant region or portion thereof (e.g., an Fc region), a PAS sequence, HES, XTEN sequences, PEG, or any combinations thereof

[0570] e. Albumin Binding Moiety

[0571] An ADA2 conjugate provided herein can include an ADA2 that is linked, directly or indirectly, to a heterologous moiety that is an albumin binding moiety, for example, an albumin binding peptide, a bacterial albumin binding domain, an albumin-binding antibody fragment, a fatty acid, or any combinations thereof.

[0572] For example, the albumin binding protein can be a bacterial albumin binding protein, an antibody or an antibody fragment including domain antibodies (see U.S. Pat. No. 6,696,245). An albumin binding protein, for example, can be a bacterial albumin binding domain, such as the one of Streptococcal protein G (Konig, T. and A. Skerra, A. (1998) J Immunol. Methods 218:73-83). Other examples of albumin binding peptides that can be used to conjugate to any ADA2 provided herein are, for instance, those having a Cys-Xaa₁-Xaa₂-Xaa₃-Xaa₄-Cys consensus sequence (SEQ ID NO:306), wherein Xaa₁ is Asp, Asn, Ser, Thr, or Trp; Xaa₂ is Asn, Gln, His, Ile, Leu, or Lys; Xaa₃ is Ala, Asp, Phe, Trp, or Tyr; and Xaa₄ is Asp, Gly, Leu, Phe, Ser, or Thr (US Patent Pub. No. 2003/0069395; Dennis et al. (2002) J. Biol. Chem. 277: 35035-35043).

[0573] Domain 3 from Streptococcal protein G (Kraulis et al, (1996) FEBS Lett. 378:190-194; Linhult et al. (2002) Protein Sci. 11:206-213) is an example of a bacterial albumin-binding domain. Examples of albumin-binding peptides include a series of peptides having the core sequence DICLPRWGCLW (SEQ ID NO:307). (See, e.g., Dennis et al. (2002) J. Biol. Chem. 277: 35035-35043). Other examples of albumin-binding peptides include: RLIEDICLPRWGCLWEDD (SEQ ID NO:308); QRLMEDICLPRWGCLWEDDF (SEQ ID NO:309); QGLIGDICLPRWGCLWGDSVK (SEQ ID NO:310), and GEWWEDICLPRWGCLWEEED (SEQ ID NO:311).

[0574] Examples of albumin-binding antibody fragments that can be conjugated to any ADA2 provided herein include those disclosed in Muller and Kontermann, Curr Opin. Mol. Ther (2007) 9:319-326; Roovers et al. (2007), Cancer Immunol. Immunother. 56:303-317; Holt et al. (2008) Prot. Eng. Design Sci., 21:283-288, each of which is incorporated by reference herein in its entirety. An example of such albumin binding moiety is the 2-(3-maleimidopropanamido)-6-(4-(4-iodophenyl)butanamido) hexanoate (“Albu” tag) (Trussel et al. (2009) Bioconjugate Chem. 20:2286-2292).

[0575] Fatty acids, in particular long chain fatty acids (LCFA) and long chain fatty acid-like albumin-binding compounds can be used to extend the in vivo half-life of any ADA2 provided herein. An example of an LCFA-like albumin-binding compound is 16-(1-(3-(9-(((2,5-dioxopyrrolidin-1-yloxy) carbonyloxy)-methyi)-7-sulfo-9H-fluoren-2-ylamino)-3-oxopropyl)-2,5-dioxopyrrolidin-3-ylthio) hexadecanoic acid (see, e.g., WO 2010/140148).

[0576] f. PAS Sequences

[0577] An ADA2 conjugate provided herein can include an ADA2 that is linked, directly or indirectly, to at least one heterologous moiety that is a PAS sequence, which is an amino acid sequence that includes mainly alanine and serine residues or that includes mainly alanine, serine, and proline residues. The amino acid sequences form random coil conformation under physiological conditions. Accordingly, the PAS sequence is a building block, an amino acid polymer, or a sequence cassette made of alanine, serine, and proline, which can be used as a part of the heterologous moiety conjugated to any ADA2 provided herein.

[0578] One of skilled in the art is aware that an amino acid polymer also can form a random coil conformation when residues other than alanine, serine, and proline are added as a minor constituent in the PAS sequence. Minor constituents include amino acids other than alanine, serine, and proline that can be added in the PAS sequence to a certain degree, e.g., up to about 12%, i.e., about 12 of 100 amino acids of the PAS sequence, up to about 10%, i.e. about 10 of 100 amino acids of the PAS sequence, up to about 9%, i.e., about 9 of 100 amino acids, up to about 8%, i.e., about 8 of 100 amino acids, about 6%, i.e., about 6 of 100 amino acids, about 5%, i.e., about 5 of 100 amino acids, about 4%, i.e., about 4 of 100 amino acids, about 3%, i.e., about 3 of 100 amino acids, about 2%, i.e., about 2 of 100 amino acids, or about 1%, i.e., about 1 of 100 of the amino acids. The amino acids different from alanine, serine and proline can be selected from Arg, Asn, Asp, Cys, Gln, Glu, Gly, His, Ile, Leu, Lys, Met, Phe, Thr, Trp, Tyr, or Val.

[0579] Under physiological conditions, the PAS sequence stretch forms a random coil conformation and thereby can mediate an increased in vivo and/or in vitro stability to any ADA2 provided herein. Since the random coil domain does not adopt a stable structure or function by itself, the biological activity mediated by any ADA2 provided herein is essentially preserved. In other examples, the PAS sequences that form random coil domains are biologically inert, especially with respect to proteolysis in blood plasma, immunogenicity, isoelectric point/electrostatic behavior, binding to cell surface receptors or internalization, but are still biodegradable, which provides clear advantages over synthetic polymers such as PEG.

[0580] Non-limiting examples of the PAS sequences forming random coil conformation include an amino acid sequence such as ASPAAPAPASPAAPAPSAPA (SEQ ID NO:312), AAPASPAPAAPSAPAPAAPS (SEQ ID NO:313), APSSPSPSAPSSPSPASPSS (SEQ ID NO:314), APSSPSPSAPSSPSPASPS (SEQ ID NO:315), SSPSAPSPSSPASPSPSSPA (SEQ ID NO:316), AASPAAPSAPPAAASPAAPSAPPA (SEQ ID NO:317), ASAAAPAAASAAASAPSAAA (SEQ ID NO:318) or any combinations thereof. Additional examples of PAS sequences are known in the art (see, e.g., US Pat. Publ. No. 2010/0292130 and International PCT Publ. No. WO 2008/155134)

[0581] g. HAP Sequences

[0582] An ADA2 conjugate provided herein can include an ADA2 that is linked, directly or indirectly, to at least one heterologous moiety that is a glycine-rich homo-amino-acid polymer (HAP). The HAP sequence can include a repetitive sequence of glycine, which has at least 50 amino acids, at least 100 amino acids, 120 amino acids, 140 amino acids, 160 amino acids, 180 amino acids, 200 amino acids, 250 amino acids, 300 amino acids, 350 amino acids, 400 amino acids, 450 amino acids, or 500 amino acids in length. In one example, the HAP sequence is capable of extending half-life of a moiety fused to or linked to the HAP sequence. Non-limiting examples of the HAP sequence includes, but are not limited to (Gly)n (SEQ ID NO:368), (Gly₄Ser)ₙ (SEQ ID NO:343) or Ser(Gly₄Ser)ₙ (SEQ ID NO:595), wherein n is 1, 2, 3, 4, 5, 6, 7, 8, 9, 10, 11, 12, 13, 14, 15, 16, 17, 18, 19, or 20. In one example, n is 20, 21, 22, 23, 24, 25, 26, 26, 28, 29, 30, 31, 32, 33, 34, 35, 36, 37, 38, 39, or 40. In another example, n is 50, 60, 70, 80, 90, 100, 110, 120, 130, 140, 150, 160, 170, 180, 190, or 200.

[0583] h. XTEN Sequences

[0584] An ADA2 conjugate provided herein can include an ADA2 that is linked, directly or indirectly, to at least one heterologous moiety that includes an XTEN sequence, polypeptide or fragment, variant, or derivative thereof. XTEN sequence is an extended length polypeptide sequence with non-naturally occurring, substantially non-repetitive sequences that are composed mainly of small hydrophilic amino acids, with the sequence having a low degree or no secondary or tertiary structure under physiologic conditions (Schellenberger et al. (2009) Nat Biotechnol. 27(12):1186-1190). An exemplary XTEN sequence is an unstructured recombinant polypeptide of 864 amino acids (SEQ ID NO:373), which extends the plasma half-life of the protein fused to the moiety. As a heterologous moiety, XTEN sequences can function as a half-life extension moiety. In addition, XTEN sequences can provide desirable properties including, but are not limited to, enhanced pharmacokinetic parameters and solubility characteristics. For example, conjugation of XTEN sequences to any ADA2 provided herein can confer one or more of the following advantageous properties: conformational flexibility, enhanced aqueous solubility, high degree of protease resistance, low immunogenicity, low binding to mammalian receptors, or increased hydrodynamic (or Stokes) radii. In some examples, an XTEN sequence can increase pharmacokinetic properties such as longer in vivo half-life or increased area under the curve (AUC), such that any ADA2 provided herein stays in vivo and retains adenosine deaminase activity for an increased period of time compared to the same ADA2 without the XTEN heterologous moiety.

[0585] Examples of XTEN sequences that can be used as heterologous moieties conjugated to any ADA2 provided herein include any of those described in U.S. Pat. Nos. 7,855,279 and 7,846,445, U.S. Patent Publication Nos. 2009/0092582, 2010/0239554, 2010/0323956, 2011/0046060, 2011/0046061, 2011/0077199, 2011/0172146, 2012/0178691, 2013/0017997, or 2012/0263701, or International Patent Publication Nos. WO 2010091122, WO 2010144502, WO 2010144508, WO 2011028228, WO 2011028229, or WO 2011028344, each of which is incorporated by reference herein in its entirety.

[0586] i. Transferrin or Fragment Thereof

[0587] An ADA2 conjugate provided herein can include an ADA2 that is linked, directly or indirectly, to at least one heterologous moiety that is a transferrin or a fragment thereof. Any transferrin can be conjugated to any ADA2 provided herein. For example, wildtype human Tf (Tf) is a 679 amino acid protein (amino acid sequence set forth in SEQ ID NOS:320 and 324; GenBank Acc. Nos. NP_001054.1 and AAB22049.1; nucleic acid sequence set forth in SEQ ID NOS:319 and 322-323, GenBank Acc. Nos. NM001063, M12530, XM039845, and S95936), of approximately 75 kDa (excluding glycosylation), with two main domains, the N terminal domain (about 330 amino acids) and the C terminal domain (about 340 amino acids), which appear to originate from a gene duplication. The N domain includes two subdomains, N1 domain and N2 domain, and the C domain includes two subdomains, C1 domain and C2 domain.

[0588] In one example, the transferrin heterologous moiety includes a transferrin splice variant. In one example, a transferrin splice variant can be a splice variant of human transferrin (SEQ ID NO:325; Genbank Acc. No. AAA61140). In another example, the transferrin portion of the chimeric protein includes one or more domains of the transferrin sequence, e.g., N domain, C domain, N1 domain, N2 domain, C1 domain, C2 domain or any combinations thereof

[0589] j. Polymer Conjugation

[0590] An ADA2 conjugate provided herein can include an ADA2 that is linked, directly or indirectly, to at least one heterologous moiety that is a polymeric molecule (polymer). Exemplary of polymers are such as polyols (i.e., poly-OH), polyamines (i.e., poly-NH₂) and polycarboxyl acids (i.e., poly-COOH), and further heteropolymers i.e., polymers containing one or more different coupling groups e.g., a hydroxyl group and amine groups. Examples of suitable polymeric molecules include polymeric molecules selected from among polyalkylene oxides (PAO), such as polyalkylene glycols (PAG), including polyethylene glycols (PEG), ethylene glycol/propylene glycol copolymers, methoxypolyethylene glycols (mPEG) and polypropylene glycols, PEG-glycidyl ethers (Epox-PEG), PEG-oxycarbonylimidazole (CDI-PEG) branched polyethylene glycols (PEGs), polyvinyl alcohol (PVA), polycarboxylates, polyvinylpyrrolidone, polyoxazoline, polyacryloylmorpholine, poly-D,L-amino acids, polyethylene-co-maleic acid anhydride, polystyrene-co-maleic acid anhydride, dextrans including carboxymethyl-dextrans, heparin, homologous albumin, celluloses, including methylcellulose, carboxymethylcellulose, ethylcellulose, hydroxyethylcellulose carboxyethylcellulose and hydroxypropylcellulose, hydrolysates of chitosan, starches such as hydroxyethyl-starches and hydroxypropyl-starches, glycogen, agaroses and derivatives thereof, guar gum, pullulan, inulin, xanthan gum, carrageenan, pectin, alginic acid hydrolysates, bio-polymer, and those disclosed in the art, for example, in U.S. Pat. No. 8,741,283 and International PCT Publication No. WO 2007/149686.

[0591] For example, polymer conjugated to any ADA2 provided herein can generally correspond to the following formula:

[R—NH]_{z}-(ADA2)

[0592] wherein (ADA2) represents any ADA2 described herein, such as wildtype, variants or modified forms thereof,

[0593] NH— is an amino group of an amino acid found on the ADA2 provided herein for the attachment to the polymer;

[0594] z is a positive integer, such as from about 1 to about 32, or 1-3, 2-4, 3-5, 4-6, 5-7, 6-8, 7-9, 8-10, 9-11, 10-12, 11-13, 12-14, 13-15, 14-16, 15-17, 16-18, 17-19, 18-20, 19-21, 20-22, 21-23, 22-24, 23-25, 24-26, 25-27, 26-28, 27-29, 28-30, 29-31 or 30-32;

[0595] R is a substantially non-antigenic polymer molecule that is attached to the ADA2 provided herein in a releasable or non-releasable form. Exemplary non-antigenic polymeric molecule can be any described herein and those disclosed in the art, for example, in U.S. Pat. No. 8,741,283 and International PCT Publication No. WO 2007/149686.

[0596] For example, any ADA2 described herein can be conjugated to least one polyethylene glycol (PEG) molecule. In some examples, the polymer can be water-soluble. In some examples, any ADA2 provided herein is conjugated to a PEG heterologous moiety and further includes a heterologous moiety selected from an immunoglobulin constant region or portion thereof (e.g., an Fc region), a PAS sequence, hydroxyethyl starch (HES) and albumin or fragment or variant thereof, an XTEN sequence, or any combinations thereof.

[0597] Covalent or other stable attachment (conjugation) of polymeric molecules, such as polyethylene glycol (PEGylation moiety (PEG)), to any ADA2 polypeptide, including variant ADA2 polypeptides, impart beneficial properties to the resulting ADA2-polymer composition. Such properties include improved biocompatibility, extension of protein (and enzymatic activity) half-life in the plasma, cells and/or in other tissues within a subject, effective shielding of the protein from proteases and hydrolysis, improved biodistribution, enhanced pharmacokinetics and/or pharmacodynamics, increased stability, decreased immunogenicity, prolonged/sustained treatment effects in a subject, and increased water solubility (see U.S. Pat. No. 4,179,337).

[0598] i. Polyethylene Glycol (PEG)

[0599] Polyethylene glycol (PEG) has been widely used in biomaterials, biotechnology and medicine primarily because PEG is a biocompatible, nontoxic, water-soluble polymer that is typically nonimmunogenic (Zhao and Harris, ACS Symposium Series 680: 458-72, 1997). In the area of drug delivery, PEG derivatives have been widely used in covalent attachment (i. e., “PEGylation”) to proteins to reduce immunogenicity, proteolysis and kidney clearance and to enhance solubility (Zalipsky, Adv. Drug Del. Rev. 16:157-82, 1995). Similarly, PEG has been attached to low molecular weight, relatively hydrophobic drugs to enhance solubility, reduce toxicity and alter biodistribution. Typically, PEGylated drugs are injected as solutions.

[0600] A closely related application is synthesis of crosslinked degradable PEG networks or formulations for use in drug delivery since much of the same chemistry used in design of degradable, soluble drug carriers can also be used in design of degradable gels (Sawhney et al., Macromolecules 26: 581-87, 1993). It also is known that intermacromolecular complexes can be formed by mixing solutions of two complementary polymers. Such complexes are generally stabilized by electrostatic interactions (polyanion-polycation) and/or hydrogen bonds (polyacid-polybase) between the polymers involved, and/or by hydrophobic interactions between the polymers in an aqueous surrounding (Krupers et al., Eur Polym J. 32:785-790, 1996). For example, mixing solutions of polyacrylic acid (PAAc) and polyethylene oxide (PEO) under the proper conditions results in the formation of complexes based mostly on hydrogen bonding. Dissociation of these complexes at physiologic conditions has been used for delivery of free drugs (i.e., non-PEGylated). In addition, complexes of complementary polymers have been formed from both homopolymers and copolymers.

[0601] Numerous reagents for PEGylation have been described in the art. Such reagents include, but are not limited to, N-hydroxysuccinimidyl (NHS) activated PEG, succinimidyl mPEG, mPEG₂-N-hydroxysuccinimide, mPEG succinimidyl alpha-methylbutanoate, mPEG succinimidyl propionate, mPEG succinimidyl butanoate, mPEG carboxymethyl 3-hydroxybutanoic acid succinimidyl ester, homobifunctional PEG-succinimidyl propionate, homobifunctional PEG propionaldehyde, homobifunctional PEG butyraldehyde, PEG maleimide, PEG hydrazide, p-nitrophenyl-carbonate PEG, mPEG-benzotriazole carbonate, propionaldehyde PEG, mPEG butryaldehyde, branched mPEG₂ butyraldehyde, mPEG acetyl, mPEG piperidone, mPEG methylketone, mPEG “linkerless” maleimide, mPEG vinyl sulfone, mPEG thiol, mPEG orthopyridylthioester, mPEG orthopyridyl disulfide, Fmoc-PEG-NHS, Boc-PEG-NHS, vinylsulfone PEG-NHS, acrylate PEG-NHS, fluorescein PEG-NHS, and biotin PEG-NHS (see e.g., Monfardini et al., Bioconjugate Chem. 6:62-69, 1995; Veronese et al., J. Bioactive Compatible Polymers 12:197-207, 1997; U.S. Pat. Nos. 5,672,662; 5,932,462; 6,495,659; 6,737,505; 4,002,531; 4,179,337; 5,122,614; 5,324,844; 5,446,090; 5,612,460; 5,643,575; 5,766,581; 5,795,569; 5,808,096; 5,900,461; 5,919,455; 5,985,263; 5,990,237; 6,113,906; 6,214,966; 6,258,351; 6,340,742; 6,413,507; 6,420,339; 6,437,025; 6,448,369; 6,461,802; 6,828,401; 6,858,736; 8,741,283; US 2001/0021763; US 2001/0044526; US 2001/0046481; US 2002/0052430; US 2002/0072573; US 2002/0156047; US 2003/0114647; US 2003/0143596; US 2003/0158333; US 2003/0220447; US 2004/0013637; US 2004/0235734; WO 05000360; US 2005/0114037; US 2005/0171328; US 2005/0209416; EP 1064951; EP 0822199; WO 01076640; WO 0002017; WO 0249673; WO 94/28024; and WO 01/87925).

[0602] In particular, the polymer is a polyethylene glycol (PEG). Suitable polymeric molecules for attachment to any ADA2 polypeptide, including variant ADA2 polypeptides, include, but are not limited to, polyethylene glycol (PEG) and PEG derivatives such as methoxy-polyethylene glycols (mPEG), PEG-glycidyl ethers (Epox-PEG), PEG-oxycarbonylimidazole (CDI-PEG), branched PEGs, and polyethylene oxide (PEO) (see e.g., Roberts et al., Advanced Drug Delivery Review (2002) 54: 459-476; Harris and Zalipsky, S (eds.) “Poly(ethylene glycol), Chemistry and Biological Applications” ACS Symposium Series 680, 1997; Mehvar et al., J. Pharm. Pharmaceut. Sci., 3(1):125-136, 2000; Harris, (2003) Nature Reviews Drug Discovery 2:214-221; and Tsubery, (2004) J. Biol. Chem 279(37):38118-24).

[0603] The polymeric moiety, such as the PEG moiety, can be of a molecular weight typically ranging from about 1 kDa to about 100 kDa. In some embodiments the polymeric molecule that is conjugated to a protein, such as any ADA2 provided herein, has a molecular weight of at least or at least about or 5, 10, 15, 20, 25, 30, 35, 40, 45, 50, 55, 60, 65, 70, 75, 80, 85, 90, 95, 100 kDa or more than 1000 kDa. Other sizes can be used, depending on the desired profile (e.g., the duration of sustained release desired, the effects, if any on biological activity, the ease in handling, the degree or lack of antigenicity and other known effects of the polyethylene glycol to a protein or analog).

[0604] The PEG moiety can be of any molecular weight, and can be branched or unbranched. In some examples, the heterologous polymer is a PEG with a branched structure. Branched polyethylene glycols are described, for example, in U.S. Pat. No. 5,643,575; Morpurgo et al. (1996) Appl. Biochem. Biotechnol. 56:59-72; Vorobjev et al. (1999) Nucleosides Nucleotides 18:2745-2750; and Caliceti et al. (1999) Bioconjug. Chem. 10:638-646, each of which is incorporated herein by reference in its entirety.

[0605] While numerous reactions have been described for PEGylation, those that are most generally applicable confer directionality, utilize mild reaction conditions, and do not necessitate extensive downstream processing to remove toxic catalysts or byproducts. For instance, monomethoxy PEG (mPEG) has only one reactive terminal hydroxyl, and thus its use limits some of the heterogeneity of the resulting PEG-protein product mixture. Activation of the hydroxyl group at the end of the polymer opposite to the terminal methoxy group is generally necessary to accomplish efficient protein PEGylation, with the aim being to make the derivatised PEG more susceptible to nucleophilic attack. The attacking nucleophile is usually the epsilon-amino group of a lysine residue, but other amines also can react (e.g. the N-terminal alpha-amine or the ring amines of histidine) if local conditions are favorable.

[0606] A more directed attachment is possible in proteins containing a single lysine or cysteine. The latter residue can be targeted by PEG-maleimide for thiol-specific modification. Alternatively, PEG hydrazide can be reacted with a periodate oxidized protein and reduced in the presence of NaCNBH₃. More specifically, PEGylated CMP sugars can be reacted with a protein in the presence of appropriate glycosyl-transferases. Alternatively, pegylation of ADA2 can occur in variants containing substitutions with non-natural amino acids that allow for site-specific chemical conjugation at optimized positions within the protein. PEGylation techniques can allow where a number of polymeric molecules are coupled to the polypeptide in question. When using this technique the immune system has difficulties in recognizing the epitopes on the polypeptide's surface responsible for the formation of antibodies, thereby reducing the immune response. For polypeptides introduced directly into the circulatory system of the human body to give a particular physiological effect (i.e. pharmaceuticals) the typical potential immune response is an IgG and/or IgM response, while polypeptides which are inhaled through the respiratory system (i.e. industrial polypeptide) potentially can cause an IgE response (i.e. allergic response). One of the theories explaining the reduced immune response is that the polymeric molecule(s) shield(s) epitope(s) on the surface of the polypeptide responsible for the immune response leading to antibody formation. Another theory or at least a partial factor is that the heavier the conjugate is, the more reduced immune response is obtained.

[0607] Typically, to make the PEGylated ADA2 polypeptides provided herein, including variant ADA2 polypeptides, PEG moieties are conjugated, via covalent attachment, to the polypeptides. Techniques for PEGylation include, but are not limited to, specialized linkers and coupling chemistries (see e.g., Roberts et al., Adv. Drug Deliv. Rev. 54:459-476, 2002), attachment of multiple PEG moieties to a single conjugation site (such as via use of branched PEGs; see e.g., Guiotto et al., Bioorg. Med. Chem. Lett. 12:177-180, 2002), site-specific PEGylation and/or mono-PEGylation (see e.g., Chapman et al., Nature Biotech. 17:780-783, 1999), and site-directed enzymatic PEGylation (see e.g., Sato, Adv. Drug Deliv. Rev., 54:487-504, 2002). Methods and techniques described in the art can produce proteins having at least 1, 2, 3, 4, 5, 6, 7, 8, 9, 10 or more than 10 PEG or PEG derivatives attached to a single protein molecule (see e.g., U.S. 2006/0104968).

[0608] The number of polyethylene glycol moieties attached to each ADA2 molecule can also vary. For example, any ADA2 provided herein can be conjugated to, on average, at least 1, 2, 3, 4, 5, 6, 7, 8, 9, 10, 12, 15, 17, 20, 25, 30 or more polyethylene glycol molecules. For example, the PEGylated ADA2 polypeptides, including variant ADA2 polypeptides generally contains at least 5 PEG moieties per molecule. In other examples, the range of number of PEG molecules per protein molecule can be 1-3, 2-4, 3-5, 4-6, 5-7, 6-8, 7-9, 8-10, 9-11, 10-12, 11-13, 12-14, 13-15, 14-16, 15-17, 16-18, 17-19, 18-20, 19-21, 20-22, 21-23, 22-24, 23-25, 24-26, 25-27, 26-28, 27-29, 28-30, 29-31 or 30-32. For example, the ADA2 polypeptides, including variant ADA2 polypeptides can have a PEG to protein molar ratio between 32:1 and 1:1, such as about or up to 30:1, 20:1, 15:1, 10:1 and 5:1. The number of PEG molecules per protein can be varied in order to modify the physical and kinetic properties of the combined conjugate to fit any particular clinical situation, as determined by one of skill in the art. Methods for determining the PEG to protein molar ratio is disclosed in the art, for example, in Delgado et al. (1992) Crit. Rev. Thera. Drug Carrier Sys. 9:249-304).

[0609] Covalent attachment of the PEG to the drug (known as “PEGylation”) can be accomplished by known chemical synthesis techniques. For example, the PEGylation of protein can be accomplished by reacting NHS-activated PEG with the protein under suitable reaction conditions. Various methods of modifying polypeptides by covalently attaching (conjugating) a PEG or PEG derivative (i.e., “PEGylation”) are known in the art (see e.g., U.S. Pat. Nos. 5,672,662; 6,737,505; U.S. 2004/0235734; U.S. 2006/0104968). Covalent attachment of a variety of polymers, such as PEG or PEG derivatives, is described in U.S. Pat. No. 8,741,283.

[0610] Activated polymers and derivatives can be employed to facilitate the conjugation of the polymer to any ADA2 provided herein. Activated polymers and derivatives have a leaving or activating group, which facilitates the attachment of the polymer system to an amine group found on the polypeptide, such as an ADA2 provided herein. For example, activated groups are those groups which are capable of reacting with an amine group (nucleophile) found on any ADA2 provided herein, such as the epsilon amine group of lysine. Exemplary activating groups include:

[chemical structure]

and other suitable leaving or activating groups such as N-hydroxybenzotriazolyl, halogen, N-hydroxyphthalimidyl, imidazolyl, O-acyl ureas, pentafluorophenol, 2,4,6-tri-chlorophenol or other suitable leaving groups apparent to one of skill in the art.

[0611] Exemplary activated PEGs include, for example, those disclosed in the art, such as in U.S. Pat. Nos. 5,122,614, 5,324,844, 5,612,460 and 5,808,096 (succinimidyl carbonate-activated polyethylene glycol (SC-PEG) and related activated PEGs), and U.S. Pat. No. 5,349,001 (cyclic imide thione activated PEGs). Conjugation reactions typically are carried out in a suitable buffer using a several-fold molar excess of activated PEG. In some examples, conjugates are made with linear PEGs, such as SC-PEG, and can contain, on average, from about 1 to about 32 PEG molecules per protein molecule. Consequently, for these, molar excesses of several hundred fold, e.g., about 200 to about 1000-fold can be employed. The molar excess used for branched polymers and polymers attached to the enzyme will be lower and can be determined using the techniques known in the art.

[0612] In some examples, the activated polymer linkers of the polymeric systems based on benzyl elimination or trimethyl lock lactonization, as described in U.S. Pat. Nos. 6,180,095, 6,720,306, 5,965,119, 6,624,142 and 6,303,569. In other examples, polymer conjugation of any ADA2 provided herein can be achieved using bicine polymer residues, as described in the art, for example, in U.S. Pat. Nos. 7,122,189, 7,087,229 and 8,741,283. In other examples, polymer conjugation of any ADA2 provided herein can be achieved using branched polymer residues, such as those described in U.S. Pat. Nos. 5,681,567, 5,756,593, 5,643,575; 5,919,455, 6,113,906, 6,153,655, 6,395,266 and 6,638,499, 6,251,382, 6,824,766, and 8,741,283. In other examples, polymer conjugation of any ADA2 provided herein can be achieved using a hindered ester-based linker, such as those described in International PCT Pub. No. WO 2008/034119. In some examples, the activated polyethylene glycol is one which provides a urethane linkage or amide-linkage with the protein such as any ADA2 provided herein.

[0613] Methods of preparing polymers having terminal carboxylic acids in high purity are described in the art, for example in U.S. Pat. Pub. No. 2007/0173615. The methods include first preparing a tertiary alkyl ester of a polyalkylene oxide followed by conversion to the carboxylic acid derivative thereof. The first step of the preparation of the PAO carboxylic acids of the process includes forming an intermediate such as t-butyl ester of polyalkylene oxide carboxylic acid. This intermediate is formed by reacting a PAO with a t-butyl haloacetate in the presence of a base such as potassium t-butoxide. Once the t-butyl ester intermediate has been formed, the carboxylic acid derivative of the polyalkylene oxide can be readily provided in purities exceeding 92%, such as exceeding 97%, 99%, or 99.5%.

[0614] In other examples, polymers having terminal amine groups can be employed to make conjugates to ADA2 provided herein. The methods of preparing polymers containing terminal amines in high purity are described in the art, for example in U.S. Pat. Nos. 7,868,131 and 7,569,657. For example, polymers having azides react with phosphine-based reducing agent such as triphenylphosphine or an alkali metal borohydride reducing agent such as NaBH₄. Alternatively, polymers including leaving groups react with protected amine salts such as potassium salt of methyl-tert-butyl imidodicarbonate (KNMeBoc) or the potassium salt of di-tert-butyl imidodicarbonate (KNBoc₂) followed by deprotecting the protected amine group.

[0615] The purity of the polymers containing the terminal amines formed by these processes is greater than about 95%, such as greater than 99%.

[0616] In some examples, the PEG portion of the polymer conjugate of ADA2 provided herein can be selected from among:
[0617] J-O—(CH₂CH₂O)ᵤ—
[0618] J-O—(CH₂CH₂O)ᵤ—CH₂C(O)—O—,
[0619] J-O—(CH₂CH₂O)ᵤ—CH₂CH₂NR—, and
[0620] J-O—(CH₂CH₂O)ᵤ—CH₂CH₂SH—,

[0621] where u is the degree of polymerization, i.e. from about 10 to about 2,300;

[0622] R is selected from among hydrogen, C₁₋₆ alkyls, C₂₋₆ alkenyls, C₂₋₆ alkynyls, C₃-12 branched alkyls, C₃₋₈ cycloalkyls, C₁₋₆ substituted alkyls, C₂₋₆ substituted alkenyls, C₂-6 substituted alkynyls, C₃₋₈ substituted cycloalkyls, aryls substituted aryls, aralkyls, C₁₋₆ heteroalkyls, substituted C₁₋₆ heteroalkyls, C₁₋₆ alkoxy, phenoxy and C₁₋₆ heteroalkoxy, and

[0623] J is a capping group, i.e., a group which is found on the terminal of the polymer and, in some aspects, can be selected from among NH₂ (or CH₂CH₂NH₂), H, SH (or CH₂CH₂SH), CO₂H (or CH₂CO₂H), C₁₋₆ alkyls, such as a methyl, or other PEG terminal activating groups known in the art.

[0624] For example, the PEG portion of the polymer conjugate can be selected from among CH₃—O—(CH₂CH₂O)ᵤ—, CH₃—O—(CH₂CH₂O)ᵤ—CH₂C(O)—O—, CH₃—O—(CH₂CH₂O)ᵤ—CH₂CH₂NH— and CH₃—O—(CH₂CH₂O)ᵤ—CH₂CH₂SH—, where u is a positive integer, such that the average total molecular weight of the polymer portion ranges from about 2 kDa to about 100 kDa.

[0625] In other examples, the PEG portion of the polymer conjugate of ADA2 provided herein can be selected from among:
[0626] —Y₁—(CH₂CH₂O)ᵤ—CH₂CH₂Y₁—,
[0627] —Y₁—(CH₂CH₂O)ᵤ—CH₂C(═Y₂)—Y₁—,
[0628] —Y₁—C(═Y₂)—(CH₂)a₁-Y₃—(CH₂C₂O)ᵤ—CH₂CH₂—Y₃—(CH₂)a₁-C(═Y₂)—Y₁—,
[0629] —Y₁—(CR₂R₃)a₂-Y₃—(CH₂)b₁-O—(CH₂CH₂O)b₁-(CH₂)b₁-Y₃—(CR₂R₃)a₂-Y₁—,
[0630] —Y₁—(CH₂CH₂O)ᵤ—CH₂CH₂—,
[0631] —Y₁—(CH₂CH₂O)ᵤ—CH₂C(═Y₂)—,
[0632] —C(═Y₂)—(CH₂)a₁-Y₃—(CH₂CH₂O)ᵤ— CH₂CH₂—Y₃—(CH₂)a₁-C(═Y₂)—, and
[0633] —(CR₂R₃)a₂-Y₃—(CH₂)b₁-O—(CH₂CH₂O)ᵤ—(CH₂)b₁-Y₃—(CR₂R₃)a₂-,

[0634] wherein: Y₁ and Y₃ are independently O, S, SO, SO₂, NR₄ or a bond;

[0635] Y₂ is O, S, or NRs;

[0636] R₂-R₅ are independently selected from among hydrogen, C₁₋₆ alkyl, C₂₋₆ alkenyl, C₂₋₆ alkynyl, C₃₋₁₉ branched alkyl, C₃₋₈ cycloalkyl, C₁₋₆ substituted alkyl, C₂₋₆ substituted alkenyl, C₂₋₆ substituted alkynyl, C₃₋₈ substituted cycloalkyl, aryl, substituted aryl, heteroaryl, substituted heteroaryl, C₁₋₆ heteroalkyl, substituted C₁₋₆ heteroalkyl, C₁₋₆ alkoxy, aryloxy, C₁₋₆ heteroalkoxy, heteroaryloxy, C₂₋₆ alkanoyl, arylcarbonyl, C₂₋₆ alkoxycarbonyl, aryloxycarbonyl, C₂₋₆ alkanoyloxy, arylcarbonyloxy, C₂₋₆ substituted alkanoyl, substituted arylcarbonyl, C₂₋₆ substituted alkanoyloxy, substituted aryloxycarbonyl, C₂₋₆ substituted alkanoyloxy and substituted arylcarbonyloxy;

[0637] a₁, a₂, and b₁ are independently zero or a positive integer from 1 to 6, for example, 0, 1 or 2; and

[0638] u is an integer from about 10 to about 2300.

[0639] In other examples, the PEG portion of the polymer conjugate of ADA₂ provided herein

can be functionalized, for example, in the following manner:
[0640] —C(═Y₄)—(CH₂)ₘ—(CH₂CH₂O)ᵤ—,
[0641] —C(═Y₄)—Y—(CH₂)ₘ—(CH₂CH₂O)ᵤ—,
[0642] —C(═Y₄)—NR₂—(CH₂)ₘ—(CH₂CH₂O)ᵤ—,
[0643] —CR₆R₇—(CH₂)ₘ—(CH₂CH₂O)ᵤ—

[0644] wherein: R₂, R₆ and R₇ are independently selected from among H, C₁₋₆ alkyls, aryls, substituted aryls, aralkyls, heteroalkyls, substituted heteroalkyls and substituted C₁₋₆ alkyls;

[0645] m is zero or is a positive integer, such as 1 or 2,

[0646] Y₄ is O or S; and

[0647] u represents the degree of polymerization.

[0648] In some examples, the polymer conjugates of ADA2 provided herein can be made by methods which include converting the multi-arm PEG-OH or “star-PEG” products, such made by NOF Corp, Tokyo, Japan, into a suitably activated polymer, using the activation techniques described in U.S. Pat. No. 5,122,614 or 5,808,096. In one example, the multi-arm polymers can contain four or more polymer arms and preferably four or eight polymer arms. In some examples, four of the PEG arms are converted to suitable functional groups, such as succinimidyl carbonate (SC), for facilitating attachment to the polypeptide, such as any ADA2 provided herein.

[0649] The polymeric conjugates provided herein can be water-soluble at room temperature. A non-limiting list of such polymers include polyalkylene oxide homopolymers such as polyethylene glycol (PEG) or polypropylene glycols, polyoxyethylenated polyols, copolymers thereof and block copolymers thereof.

[0650] As an exemplary illustrative method for making PEGylated ADA2 polypeptides, including variant ADA2 polypeptides, PEG aldehydes, succinimides and carbonates have each been applied to conjugate PEG moieties, typically succinimidyl PEGs. Exemplary succinimidyl monoPEG (mPEG) reagents including mPEG-Succinimidyl Propionates (mPEG-SPA), mPEG Succinimidyl Carboxymethyl Ester (mPEG-SCM), mPEG-Succinimidyl Butanoates (mPEG-SBA), and (for attaching “branched” PEGs) mPEG2-N-Hydroxylsuccinimide. These PEGylated succinimidyl esters contain different length carbon backbones between the PEG group and the activated cross-linker, and either a single or branched PEG group. These differences can be used, for example, to provide for different reaction kinetics and to potentially restrict sites available for PEG attachment to ADA2 during the conjugation process. Such PEGylated ADA2 compositions can be readily purified to yield compositions having at least about 90% to about 100% PEGylated ADA2 molecules, and being substantially free of non-PEGylated ADA2 (less than 5% non-PEGylated).

[0651] In one example, the PEGylation includes conjugation of mPEG-SCM, for example, mPEG-SCM-20K (having a molecular weight of about 20 kDa) or another succinimidyl carboxymethyl esters of PEG derivative, to any ADA2 polypeptide, including variant ADA2 polypeptides. Succinimidyl carboxymethyl esters of PEG derivatives, such as mPEG-SCM-20K readily couple to amino groups of lysines in proteins or the N-terminal amine in biological active molecules. For example, covalent conjugation of m-PEG-SCM-20K and ADA2 (which is approximately 59 kDa in size as a monomer) provides stable amide bonds between ADA2 and mPEG. Typically, the mPEG-SCM-20K or other PEG is added to any ADA2 polypeptide, including variant ADA2 polypeptides, at a PEG:polypeptide molar ratio of 15:1 in a suitable buffer, followed by sterilization, e.g., sterile filtration, and continued conjugation, for example, with stirring, overnight at 4° C. in a cold room.

[0652] Other methods of coupling succinimidyl esters of PEG, including butanoic acid derivatives such as mPEG-SBA-30K, to a polypeptide are known in the art (see e.g., U.S. Pat. Nos. 5,672,662; 6,737,505; 8,784,791; U.S. 2004/0235734 and U.S. 2005/0158273). For example, a polypeptide, such as any ADA2 provided herein, can be coupled to an NHS activated PEG derivative by reaction in a borate buffer (0.1 M, pH 8.0) for one hour at 4° C. The resulting PEGylated protein can be purified by ultrafiltration. Alternatively, PEGylation of a bovine alkaline phosphatase can be accomplished by mixing the phosphatase with mPEG-SBA in a buffer containing 0.2 M sodium phosphate and 0.5 M NaCl (pH 7.5) at 4° C. for 30 minutes. Unreacted PEG can be removed by ultrafiltration or using resin columns such as Capto Phenyl resin columns (GE Healthcare). Another method reacts polypeptide with mPEG-SBA in deionized water to which triethylamine is added to raise the pH to 7.2-9. The resulting mixture is stirred at room temperature for several hours to complete the PEGylation.

[0653] As shown herein, PEGylation of variant ADA2 confers reduction in heparin binding property to the ADA2. The reduction in heparin binding can be in addition to any attenuated heparin binding resulting from amino acid replacement(s) that reduce heparin binding. Thus, PEGylation of ADA2 also improves pharmacokinetic properties of the ADA2, and PEGylation can be used in place of or in addition to amino acid replacement(s) to attenuate heparin binding.

[0654] ii. Hydroxyethyl Starch (HES)

[0655] In some examples, at least one heterologous moiety is a polymer, e.g., hydroxyethyl starch (HES) or a derivative thereof. Hydroxyethyl starch (HES) is a derivative of naturally occurring amylopectin and is degraded by alpha-amylase in the body. HES is a substituted derivative of the carbohydrate polymer amylopectin, which is present in corn starch at a concentration of up to 95% by weight. HES exhibits advantageous biological properties and is used as a blood volume replacement agent and in hemodilution therapy in the clinics.

[0656] Amylopectin contains glucose moieties, wherein in the main chain α-1,4-glycosidic bonds are present and at the branching sites α-1,6-glycosidic bonds are found. The physical-chemical properties of this molecule are mainly determined by the type of glycosidic bonds. Due to the nicked α-1,4-glycosidic bond, helical structures with about six glucose-monomers per turn are produced. The physicochemical as well as the biochemical properties of the polymer can be modified via substitution. The introduction of a hydroxyethyl group can be achieved via alkaline hydroxyethylation. By adapting the reaction conditions it is possible to exploit the different reactivity of the respective hydroxy group in the unsubstituted glucose monomer with respect to hydroxyethylation. One of skill in the art can determine the substitution pattern. HES is mainly characterized by the molecular weight distribution and the degree of substitution (DS), which refers to the molar ratio of the substitution.

[0657] In one example, hydroxyethyl starch has a mean molecular weight (weight mean) of from 1 to 300 kD, from 2 to 200 kD, from 3 to 100 kD, or from 4 to 70 kD. Hydroxyethyl starch can further exhibit a molar degree of substitution (DS) of from 0.1 to 3, preferably 0.1 to 2, more preferred, 0.1 to 0.9, preferably 0.1 to 0.8, and a ratio between C2:C6 substitution in the range of from 2 to 20 with respect to the hydroxyethyl groups. A non-limiting example of HES having a mean molecular weight of about 130 kD is a HES with a DS of 0.2 to 0.8, such as 0.2, 0.3, 0.4, 0.5, 0.6, 0.7, or 0.8, and in particular, a DS of 0.4 to 0.7 such as 0.4, 0.5, 0.6, or 0.7.

[0658] In one example, the HES can have a mean molecular weight of about 130 kD, and is VOLUVEN® (Fresenius Kabi, Germany). VOLUVEN® is an artificial colloid, employed, e.g., for volume replacement used in the therapeutic indication for therapy and prophylaxis of hypovolemia. The characteristics of VOLUVEN® are a mean molecular weight of 130±20 kDa, with a molar substitution of 0.4 and a C2:C6 ratio of about 9:1. In other examples, ranges of the mean molecular weight of hydroxyethyl starch are, e.g., 4 to 70 kDa or 10 to 70 kDa or 12 to 70 kDa or 18 to 70 kDa or 50 to 70 kDa or 4 to 50 kDa or 10 to 50 kDa or 12 to 50 kDa or 18 to 50 kDa or 4 to 18 kDa or 10 to 18 kDa or 12 to 18 kDa or 4 to 12 kDa or 10 to 12 kDa or 4 to 10 kDa. In other examples, the mean molecular weight of hydroxyethyl starch employed is in the range of from more than 4 kDa and below 70 kDa, such as about 10 kDa, or in the range of from 9 to 10 kDa or from 10 to 11 kDa or from 9 to 11 kDa, or about 12 kDa, or in the range of from 11 to 12 kDa) or from 12 to 13 kDa or from 11 to 13 kDa, or about 18 kDa, or in the range of from 17 to 18 kDa or from 18 to 19 kDa or from 17 to 19 kDa, or about 30 kDa, or in the range of from 29 to 30, or from 30 to 31 kDa, or about 50 kDa, or in the range of from 49 to 50 kDa or from 50 to 51 kDa or from 49 to 51 kDa.

[0659] In some examples, the heterologous moiety can be a mixture of hydroxyethyl starches having different mean molecular weights and/or different degrees of substitution and/or different ratios of C2:C6 substitution. Therefore, mixtures of hydroxyethyl starches can be employed having different mean molecular weights and different degrees of substitution and different ratios of C2:C6 substitution, or having different mean molecular weights and different degrees of substitution and the same or about the same ratio of C2:C6 substitution, or having different mean molecular weights and the same or about the same degree of substitution and different ratios of C2:C6 substitution, or having the same or about the same mean molecular weight and different degrees of substitution and different ratios of C2:C6 substitution, or having different mean molecular weights and the same or about the same degree of substitution and the same or about the same ratio of C2:C6 substitution, or having the same or about the same mean molecular weights and different degrees of substitution and the same or about the same ratio of C2:C6 substitution, or having the same or about the same mean molecular weight and the same or about the same degree of substitution and different ratios of C2:C6 substitution, or having about the same mean, molecular weight and about the same degree of substitution and about the same ratio of C2:C6 substitution.

[0660] iii. Polysialic Acids (PSA)

[0661] In certain examples, at least one heterologous moiety is a polymer, e.g., polysialic acids (PSAs) or a derivative thereof. Polysialic acids (PSAs) are naturally occurring unbranched polymers of sialic acid produced by certain bacterial strains and in mammals in certain cells (Roth J., et al. (1993) in Polysialic Acid: From Microbes to Man, eds Roth J., Rutishauser U., Troy F. A. (Birkhauser Verlag, Basel, Switzerland), pp 335-348). They can be produced in various degrees of polymerization from about 80 or more sialic acid residues to about 2, by limited acid hydrolysis or by digestion with neuraminidases, or by fractionation of the natural, bacterially derived forms of the polymer.

[0662] The composition of different polysialic acids also varies such that there are homopolymeric forms i.e. the α-2,8-linked polysialic acid of the capsular polysaccharide of E. coli strain K1 and the group-B meningococci, which is also found on the embryonic form of the neuronal cell adhesion molecule (N-CAM). Heteropolymeric forms also exist, such as the alternating α-2,8 α-2,9 polysialic acid of E. coli strain K92 and group C polysaccharides of N. meningitidis. Sialic acid can also be found in alternating copolymers with monomers other than sialic acid such as group W135 or group Y of N. meningitidis. Polysialic acids have important biological functions including the evasion of the immune and complement systems by pathogenic bacteria and the regulation of glial adhesiveness of immature neurons during fetal development (wherein the polymer has an anti-adhesive function) (Cho and Troy, (1994) P.N.A.S. 91:11427-11431), although there are no known receptors for polysialic acids in mammals.

[0663] In other examples, the α-2,8-linked polysialic acid of E. coli strain K1, also known as colominic acid, are used (in various lengths). Various methods of attaching or conjugating polysialic acids to a polypeptide have been described (see e.g., U.S. Pat. No. 5,846,951; WO 01/87922, and US 2007/0191597, each of which is incorporated herein by reference in its entirety).

[0664] iv. Other Polymers

[0665] In other examples, the polymer moiety for conjugation to any ADA2 provided herein can be selected from among one or more effectively non-antigenic materials such as dextran, polyvinyl alcohols, carbohydrate-based polymers, hydroxypropylmeth-acrylamide (HPMA), polyalkylene oxides, and/or copolymers thereof, including other polymers known in the art and/or described in U.S. Pat. No. 6,153,655. It is within the level of one of skill in the art to select the polymer based on the purpose of use, and to select the suitable conjugation methods.

[0666] 2. Methods of Producing Conjugates or Fusion Proteins

[0667] Heterologous moieties can be conjugated directly or indirectly to any ADA2 provided herein. For example, the heterologous moieties can be conjugated in a post-translational manner, after the recombinant production of the ADA2 polypeptide, by direct chemical linkage or indirectly via a linker. In other examples, heterologous moieties that are protein or polypeptide moieties, can be directly or indirectly conjugated to any ADA2 provided herein. In one example, the protein or polypeptide moieties can be directly linked, for example, as a fusion protein. In other examples, the heterologous moiety is conjugated indirectly, via a linker. In other examples, the heterologous moiety can be linked by disulfide bonds formed between a thiol group in the heterologous moiety and the cysteine residues in the ADA2 provided herein.

[0668] Linkers

[0669] Linkers, or spacers, can be used to connect heterologous moieties and polypeptides, such as any ADA2 provided herein. A linker refers to a peptide or polypeptide sequence (e.g. a synthetic peptide or polypeptide sequence), or a non-peptide linker for which its main function is to connect two moieties, such as an ADA2 provided herein and the heterologous moiety. Linkers can be used to maintain the structural flexibility and other conformational characteristics of the individual residues or at the secondary, tertiary, or quaternary structural levels of domains or moieties of the polypeptide conjugate or fusion protein, in order to maintain functional properties of the moieties. Linkers can also provide additional beneficial properties to the polypeptide conjugate or fusion protein, such as increased protein expression in mammalian expression systems, improved biophysical properties such as stability and solubility, improved protein purification and detection and/or increased enzymatic activity. In some examples, two or more linkers can be linked in tandem. Linkers can be peptide linkers that link a protein or polypeptide moiety to the ADA2 polypeptide. Other exemplary linkers include chemical linking agents and heterobifunctional linking agents.

[0670] When multiple linkers are present between the ADA2 and the heterologous moiety, each of the linkers can be the same or different. Generally, linkers provide flexibility to the polypeptide molecule. Linkers are not typically cleaved; however in certain examples, such cleavage can be desirable. Accordingly, in some embodiments a linker can contain one or more protease-cleavable sites, which can be located within the sequence of the linker or flanking the linker at either end of the linker sequence.

[0671] Linkers can be introduced into polypeptide sequences, such as any ADA2 provided herein, using techniques known in the art (e.g., chemical conjugation, recombinant techniques, or peptide synthesis). Modifications can be confirmed by DNA sequence analysis. In some examples, the linkers can be introduced using recombinant techniques. In other examples, the linkers can be introduced using solid phase peptide synthesis. In other examples, the polypeptide, such as any ADA2 provided herein, can contain simultaneously one or more linkers that have been introduced using recombinant techniques and one or more linkers that have been introduced using solid phase peptide synthesis or methods of chemical conjugation known in the art.

[0672] i. Peptide Linkers

[0673] Peptide linkers can be used to link the heterologous moiety to the ADA2 polypeptide provided herein. In one example, peptide linkers can be fused to the C-terminal end of a first polypeptide (e.g., the ADA2 polypeptide) and the N-terminal end of a second polypeptide (e.g., a protein or polypeptide heterologous moiety). This structure can be repeated multiple times such that at least one, preferably 2, 3, 4, or more polypeptides are linked to one another via peptide linkers at their respective termini.

[0674] For example, two molecules (e.g., the ADA2 polypeptide and the heterologous moiety) can be adjacent in the construct or separated by a linker polypeptide that contains, 1, 2, 3, or more, amino acids. In some examples, the peptide linker can contain at least two amino acids, at least three, at least four, at least five, at least 10, at least 20, at least 30, at least 40, at least 50, at least 60, at least 70, at least 80, at least 90, or at least 100 amino acids. In other examples, the peptide linker can contain at least 200, at least 300, at least 400, at least 500, at least 600, at least 700, at least 800, at least 900, or at least 1,000 amino acids. In some examples, the peptide linker can contain at least about 10, 20, 30, 40, 50, 60, 70, 80, 90, 100, 150, 200, 300, 400, 500, 600, 700, 800, 900, 1000, 1100, 1200, 1300, 1400, 1500, 1600, 1700, 1800, 1900, or 2000 amino acids. The peptide linker can contain 1-5 amino acids, 1-10 amino acids, 1-20 amino acids, 10-50 amino acids, 50-100 amino acids, 100-200 amino acids, 200-300 amino acids, 300-400 amino acids, 400-500 amino acids, 500-600 amino acids, 600-700 amino acids, 700-800 amino acids, 800-900 amino acids, or 900-1000 amino acids. The linker is of a length such that the two variable domains are bridged without substantial interference. For example, a linker polypeptide can have a sequence Z₁—X—Z₂, where Z₁ and Z₂ are the ADA2 polypeptide and the heterologous moiety, respectively, and where X is a sequence of a peptide linker. In another example, the polypeptide has a sequence of Z₁—X—Z₂(—X—Z)ₙ, where “n” is any integer, i.e. generally 1 or 2.

[0675] Typically, the peptide linker is of a sufficient length to allow both the ADA2 polypeptide and the heterologous moiety to retain their conformational structure and functions. Examples of peptide linkers include, but are not limited to: -Gly-Gly-, GGGG (SEQ ID NO:362), GGGGG (SEQ ID NO:360), GGGGS or (GGGGS)n (SEQ ID NO:343), SSSSG or (SSSSG)n (SEQ ID NO:344), GKSSGSGSESKS (SEQ ID NO:345), GGSTSGSGKSSEGKG (SEQ ID NO:346), GSTSGSGKSSSEGSGSTKG (SEQ ID NO:347), GSTSGSGKPGSGEGSTKG (SEQ ID NO:348), EGKSSGSGSESKEF (SEQ ID NO:349), AlaAlaProAla or (AlaAlaProAla)n (SEQ ID NO:350), SGGSGGS (SEQ ID NO:363), GGSGGSGGSGGSGGG (SEQ ID NO:364), GGSGGSGGGGSGGGGS (SEQ ID NO:365), GGSGGSGGSGGSGGSGGS (SEQ ID NO:366), GGGGSGGGGSGGGGS (SEQ ID NO:367), Ser(Gly₄Ser)ₙ (SEQ ID NO:595) or (Gly-Ser)n residues with some Glu or Lys residues dispersed throughout to increase solubility, where n can be an integer from 1 to 20, such as 1, 2, 3, 4, 5, 6, 7, 8, 9, 10, 11, 12, 13, 14, 15, 16, 17, 18, 19, or 20. Other exemplary linkers include peptide linkers with the formula [(Gly)ₓ-Ser_{y}]_{z} where x is from 1 to 4, y is 0 or 1, and z is from 1 to 50. In other examples, the peptide linker includes the sequence Gₙ, where n can be an integer from 1 to 100. In another example, the sequence of the peptide linker can be (GA)ₙ or (GGS)ₙ. Other exemplary linkers include:

(1) Gly₄Ser with NcoI ends
(SEQ ID NO: 351)
CCATGGGCGG CGGCGGCTCT GCCATGG
(2) (Gly₄Ser)₂ with NcoI ends
(SEQ ID NO: 352)
CCATGGGCGG CGGCGGCTCT GGCGGCGGCG GCTCTGCCAT GG
(3) (Ser₄Gly)₄ with NcoI ends
(SEQ ID NO: 353)
CCATGGCCTC GTCGTCGTCG GGCTCGTCGT CGTCGGGCTC
GTCGTCGTCG GGCTCGTCGT CGTCGGGCGC CATGG
(4) (Ser₄Gly)₂ with NcoI ends
(SEQ ID NO: 354)
CCATGGCCTC GTCGTCGTCG GGCTCGTCGT CGTCGGGCGC CATGG

[0676] Linking moieties are described, for example, in Huston et al. (1988) PNAS 85:5879-5883, Whitlow et al. (1993) Protein Engineering 6:989-995, and Newton et al., (1996) Biochemistry 35:545-553. Other suitable peptide linkers include any of those described in U.S. Pat. No. 4,751,180 or 4,935,233, which are hereby incorporated by reference. A polynucleotide encoding a desired peptide linker can be inserted between, and in the same reading frame as a polynucleotide encoding any ADA2 provided herein and the protein or polypeptide heterologous moiety, using any suitable conventional technique. Linking moieties can also include derivatives and analogs of the naturally occurring amino acids, as well as various non-naturally occurring amino acids (D- or L-), hydrophobic or non-hydrophobic, known in the art.

[0677] In some examples, a peptide linker includes peptides (or polypeptides) (e.g., natural, or non-naturally occurring peptides) which includes an amino acid sequence that links or genetically fuses a first linear sequence of amino acids to a second linear sequence of amino acids to which it is not naturally linked or genetically fused in nature. For example, the peptide linker can include non-naturally occurring polypeptides which are modified forms of naturally occurring polypeptides (e.g., that includes a mutation such as an addition, substitution or deletion). In another example, the peptide linker can include non-naturally occurring amino acids. In another example, the peptide linker can include naturally occurring amino acids occurring in a linear sequence that does not occur in nature. In still another example, the peptide linker can include a naturally occurring polypeptide sequence.

[0678] ii. Heterobifunctional Linking Agents

[0679] Linkage of any ADA2 provided herein and a heterologous moiety can be direct or indirect. For example, the linkage can be achieved by chemical linkage or facilitated by bifunctional or heterobifunctional linkers, such as any known in the art or provided herein.

[0680] Numerous heterobifunctional cross-linking reagents that are used to form covalent bonds between amino groups and thiol groups and to introduce thiol groups into proteins, are known to those of skill in the art (see, e.g., the PIERCE CATALOG, ImmunoTechnology Catalog & Handbook, 1992-1993, which describes the preparation of and use of such reagents and provides a commercial source for such reagents; see, also, e.g., Cumber et al. (1992) Bioconjugate Chem. 3:397-401; Thorpe et al. (1987) Cancer Res. 47:5924-5931; Gordon et al. (1987) Proc. Natl. Acad Sci. 84:308-312; Walden et al. (1986) J. Mol. Cell Immunol. 2:191-197; Carlsson et al. (1978) Biochem. J. 173: 723-737; Mahan et al. (1987) 25 Anal. Biochem. 162:163-170; Wawrzynczak et al. (1992) Br J. Cancer 66:361-366; Fattom et al. (1992) Infection & Immun. 60:584-589). These reagents can be used to form covalent bonds between the N-terminal portion of the heterologous moiety and the C-terminal portion of the ADA2 provided herein, or between each of those portions and a linker. These reagents include, but are not limited to: N-succinimidyl-3-(2-pyridyldithio)propionate (SPDP; disulfide linker); sulfosuccinimidyl 6-[3-(2-pyridyldithio)propionamido]hexanoate (sulfo-LC-SPDP); succinimidyloxycarbonyl-α-methyl benzyl thiosulfate (SMBT, hindered disulfate linker); succinimidyl 6-[3-(2-pyridyldithio) propionamido]hexanoate (LC-SPDP); sulfosuccinimidyl 4-(N-maleimidomethyl)cyclohexane-1-carboxylate (sulfo-SMCC); succinimidyl 3-(2-pyridyldithio)butyrate (SPDB; hindered disulfide bond linker); sulfosuccinimidyl 2-(7-azido-4-methylcoumarin-3-acetamide) ethyl-1,3′-dithiopropionate (SAED); sulfo-succinimidyl 7-azido-4-methylcoumarin-3-acetate (SAMCA); sulfosuccinimidyl-6-[alpha-methyl-alpha-(2-pyridyldithio)toluamido]-hexanoate (sulfo-LC-SMPT); 1,4-di-[3′-(2′-pyridyldithio)propionamido]butane (DPDPB); 4-succinimidyloxycarbonyl-α-methyl-α-(2-pyridylthio)toluene (SMPT, hindered disulfate linker); sulfosuccinimidyl-6-[α-methyl-α-(2-pyrimiyldi-thio)toluamido]hexanoate (sulfo-LC-SMPT); m-maleimidobenzoyl-N-hydroxy-succinimide ester (MBS); m-maleimidobenzoyl-N-hydroxysulfo-succinimide ester (sulfo-MBS); N-succinimidyl(4-iodoacetyl)aminobenzoate (SIAB; thioether linker); sulfosuccinimidyl-(4-iodoacetyl)amino benzoate (sulfo-SIAB); succinimidyl-4-(p-maleimidophenyl)butyrate (SMPB); sulfosuccinimidyl-4-(p-maleimido-phenyl)butyrate (sulfo-SMPB); azidobenzoyl hydrazide (ABH); maleimido caproyl (MC); maleimido propanoyl (MP); succinimidyl 4-(K-maleimidomethyl)-cyclohexane-1-carboxylate (SMCC); m-maleimidobenzoyl-N-hydroxysuccinimide ester (MBS); N-succinimidyl(4-iodoacetyl)aminobenzonate (SIAB); and succinimidyl 6-[3-(2-pyridyldithio)-propionamide hexanoate (LC-SPDP) (see, e.g., U.S. Pat. No. 7,375,078). Other exemplary linkers include, but are not limited to linkers with the formula:
[0681] —C(O)CH₂OCH₂C(O)—;
[0682] —C(O)CH₂NHCH₂C(O)—;
[0683] —C(O)CH₂SCH₂C(O)—;
[0684] —C(O)CH₂CH₂CH₂C(O)—, and
[0685] —C(O)CH₂CH₂C(O)—.

[0686] These linkers, for example, can be used in combination with peptide linkers, such as those that increase flexibility or solubility or that provide for or eliminate steric hindrance. Any other linkers known to those of skill in the art for linking a polypeptide molecule to another molecule can be employed. General properties are such that the resulting molecule retains the adenosine deaminase function and stability of the protein. For in vivo use of the ADA2 conjugate or fusion protein, generally the linker must be biocompatible for administration to animals, including humans.

### E. METHODS OF PRODUCING NUCLEIC ACIDS ENCODING ADA2 AND POLYPEPTIDES THEREOF

[0687] Polypeptides of any ADA2 as described herein, including variants or modified forms thereof, can be obtained by methods well known in the art for protein purification and recombinant protein expression. Polypeptides also can be synthesized chemically. Modified or variant forms can be engineered from a wildtype polypeptide using standard recombinant DNA methods. For example, any ADA2, including variants or modified forms can be engineered from a wildtype polypeptide, such as by site-directed mutagenesis.

[0688] 1. Isolation or Preparation of Nucleic Acids Encoding ADA2 Polypeptides

[0689] Polypeptides can be cloned or isolated using any available methods known in the art for cloning and isolating nucleic acid molecules. Such methods include PCR amplification of nucleic acids and screening of libraries, including nucleic acid hybridization screening, antibody-based screening and activity-based screening. For example, when the polypeptides are produced by recombinant means, any method known to those of skill in the art for identification of nucleic acids that encode desired genes can be used. Any method available in the art can be used to obtain a full length or partial (i.e., encompassing the entire coding region) cDNA or genomic DNA clone encoding the ADA2 polypeptide, such as from a cell or tissue source.

[0690] Methods for amplification of nucleic acids can be used to isolate nucleic acid molecules encoding a desired polypeptide, including for example, polymerase chain reaction (PCR) methods. Examples of such methods include use of a Perkin-Elmer Cetus thermal cycler and Taq polymerase (Gene Amp, Applied Biosystems, Carlsbad, Calif.). A nucleic acid containing material can be used as a starting material from which a desired polypeptide-encoding nucleic acid molecule can be isolated. For example, DNA and mRNA preparations, cell extracts, tissue extracts, fluid samples (e.g., blood, serum, saliva), samples from healthy and/or diseased subjects can be used in amplification methods. The source can be from any eukaryotic species including, but not limited to, vertebrate, mammalian, human, porcine, bovine, feline, avian, equine, canine, and other primate sources. Nucleic acid libraries also can be used as a source of starting material. Primers can be designed to amplify a desired polypeptide. For example, primers can be designed based on expressed sequences from which a desired polypeptide is generated. Primers can be designed based on back-translation of a polypeptide amino acid sequence. If desired, degenerate primers can be used for amplification. Oligonucleotide primers that hybridize to sequences at the 3′ and 5′ termini of the desired sequence can be uses as primers to amplify by PCR sequences from a nucleic acid sample. Primers can be used to amplify the full-length ADA2. Nucleic acid molecules generated by amplification can be sequenced and confirmed to encode a desired polypeptide.

[0691] In addition, nucleic acid molecules encoding the ADA2 polypeptide can be chemically synthesized or produced in a semi-synthetic manner. The synthetically or semi-synthetically produced nucleic acid molecule can encode the amino acid sequence of any ADA2, such as any described herein in Section C above. For example, the synthesized or semi-synthetically produced nucleic acid molecule can be encoded by a nucleic acid molecule having a sequence of nucleotides of any as described herein. Chemically synthesized nucleic acid molecules can span the entire length of the wildtype ADA2 gene, or a truncated sequence thereof. Chemical gene synthesis can be achieved by any methods known in the art, such as annealing chemically synthesized oligonucleotides. Semi-synthetic gene assembly, such as the Gibson assembly method, can also be used to produce the nucleic acid molecule encoding any of the ADA2 polypeptides, including variants, as described herein.

[0692] The nucleic acid encoding any of the ADA2 polypeptides can be a codon-optimized nucleic acid molecule, where the codon is optimized for the expression system used to produce the polypeptide (i.e., codons that are preferred in the organism of the expression system are used more frequently in the synthesized nucleic acid). For example, for production of the polypeptide in an Escherichia coli expression system, the codons for each amino acid can be optimized such that the most preferred codon in E. coli are used for each amino acid.

[0693] Additional nucleotide sequences can be joined to a polypeptide-encoding nucleic acid molecule, including linker sequences containing restriction endonuclease sites for the purpose of cloning the synthetic gene into a vector, for example, a protein expression vector or a vector designed for the amplification of the core protein coding DNA sequences. Furthermore, additional nucleotide sequences specifying functional DNA elements can be operatively linked to a polypeptide-encoding nucleic acid molecule. Examples of such sequences include, but are not limited to, promoter sequences designed to facilitate intracellular protein expression, and secretion sequences, for example heterologous signal sequences, designed to facilitate protein secretion. Such sequences are known to those of skill in the art. Additional nucleotide residue sequences such as sequences of bases specifying protein binding regions also can be linked to enzyme-encoding nucleic acid molecules. Such regions include, but are not limited to, sequences of residues that facilitate or encode proteins that facilitate uptake of an enzyme into specific target cells, or otherwise alter pharmacokinetics of a product of a synthetic gene.

[0694] In addition, tags or other moieties can be added, for example, to aid in detection or affinity purification of the polypeptide. For example, additional nucleotide residue sequences such as sequences of bases specifying an epitope tag or other detectable marker also can be linked to enzyme-encoding nucleic acid molecules. Examples of such sequences include nucleic acid sequences encoding the FLAG® tag or the Strep tag.

[0695] The identified and isolated nucleic acids can then be inserted into an appropriate cloning vector. A large number of vector-host systems known in the art can be used. Possible vectors include, but are not limited to, plasmids or modified viruses, but the vector system must be compatible with the host cell used. Such vectors include, but are not limited to, bacteriophages such as lambda derivatives, or plasmids such as pCMV4, pCMV-Script (Agilent Technologies, Santa Clara, Calif.), pBR322, pUC plasmid derivatives or pBluescript vectors (Stratagene, La Jolla, Calif.). The insertion into a cloning vector can, for example, be accomplished by ligating the DNA fragment into a cloning vector which has complementary cohesive termini. Insertion can be effected using TOPO cloning vectors (Invitrogen, Carlsbad, Calif.).

[0696] If the complementary restriction sites used to fragment the DNA are not present in the cloning vector, the ends of the DNA molecules can be enzymatically modified. Alternatively, any site desired can be produced by ligating nucleotide sequences (linkers) onto the DNA termini; these ligated linkers can contain specific chemically synthesized oligonucleotides encoding restriction endonuclease recognition sequences. In an alternative method, the cleaved vector and protein gene can be modified by homopolymeric tailing.

[0697] Recombinant molecules can be introduced into host cells via, for example, transformation, transfection, infection, electroporation and sonoporation, so that many copies of the gene sequence are generated. In specific embodiments, transformation of host cells with recombinant DNA molecules that incorporate the isolated protein gene, cDNA, or synthesized DNA sequence enables generation of multiple copies of the gene. Thus, the gene can be obtained in large quantities by growing transformants, isolating the recombinant DNA molecules from the transformants and, when necessary, retrieving the inserted gene from the isolated recombinant DNA.

[0698] In addition to recombinant production, any ADA2, including variants or modified forms thereof provided herein can be produced by direct peptide synthesis using solid-phase techniques (see e.g., Stewart et al. (1969) Solid-Phase Peptide Synthesis, WH Freeman Co., San Francisco; Merrifield J (1963) J Am Chem Soc., 85:2149-2154). In vitro protein synthesis can be performed using manual techniques or by automation. Automated synthesis can be achieved, for example, using Applied Biosystems 431A Peptide Synthesizer (Perkin Elmer, Foster City Calif.) in accordance with the instructions provided by the manufacturer. Various fragments of a polypeptide can be chemically synthesized separately and combined using chemical methods.

[0699] 2. Generation of Mutant or Modified Nucleic Acid and Encoding Polypeptides

[0700] The modifications provided herein can be made by standard recombinant DNA techniques such as are routine to one of skill in the art. Any method known in the art to effect mutation of any one or more amino acids in a target protein can be employed. Methods include standard site-directed mutagenesis (using e.g., a kit, such as QuikChange available from Stratagene) of encoding nucleic acid molecules, or by solid phase polypeptide synthesis methods. Site-specific variations to the wildtype ADA2 or any of the ADA2 variants provided herein can also be introduced during the chemical gene synthesis or the semi-synthetic gene assembly if such methods are used to generate the nucleic acid sequence encoding the ADA2.

[0701] 3. Vectors and Cells

[0702] For recombinant expression of one or more of the desired proteins, such as any ADA2 polypeptide described herein, the nucleic acid containing all or a portion of the nucleotide sequence encoding the protein can be inserted into an appropriate expression vector, i.e., a vector that contains the necessary elements for the transcription and translation of the inserted protein coding sequence. The necessary transcriptional and translational signals also can be supplied by the native promoter for enzyme genes, and/or their flanking regions.

[0703] Also provided are vectors that contain a nucleic acid encoding the enzyme. Cells containing the vectors also are provided. The cells include eukaryotic and prokaryotic cells, and the vectors are any suitable for use therein.

[0704] Prokaryotic and eukaryotic cells, including endothelial cells, containing the vectors are provided. Such cells include bacterial cells, yeast cells, fungal cells, Archea, plant cells, insect cells and animal cells. The cells are used to produce a protein thereof by growing the above-described cells under conditions whereby the encoded protein is expressed by the cell, and recovering the expressed protein. For purposes herein, for example, the enzyme can be secreted into the medium.

[0705] Provided are vectors that contain a sequence of nucleotides that encodes any ADA2 polypeptide or variants, coupled to the native or heterologous signal sequence, as well as multiple copies thereof. The vectors can be selected for expression of the enzyme protein in the cell or such that the enzyme protein is expressed as a secreted protein.

[0706] Any of the variety of host-vector systems well known to those of skill in the art can be used to express the protein coding sequence. These include but are not limited to mammalian cell systems infected with virus (e.g., vaccinia virus, adenovirus and other viruses); insect cell systems infected with virus (e.g., baculovirus); microorganisms such as yeast containing yeast vectors; or bacteria transformed with bacteriophage, DNA, plasmid DNA, or cosmid DNA. The expression elements of vectors vary in their strengths and specificities. Depending on the host-vector system used, any one of a number of suitable transcription and translation elements can be used.

[0707] Any methods known to those of skill in the art for the insertion of DNA fragments into a vector can be used to construct expression vectors containing a chimeric gene containing appropriate transcriptional/translational control signals and protein coding sequences. These methods can include in vitro recombinant DNA and synthetic techniques and in vivo recombinants (genetic recombination). Expression of nucleic acid sequences encoding protein, or domains, derivatives, fragments or homologs thereof, can be regulated by a second nucleic acid sequence so that the genes or fragments thereof are expressed in a host transformed with the recombinant DNA molecule(s). For example, expression of the proteins can be controlled by any promoter/enhancer known in the art. In a specific embodiment, the promoter is not native to the genes for a desired protein. Promoters which can be used include but are not limited to the SV40 early promoter (Bemoist and Chambon, Nature 290:304-310 (1981)), the promoter contained in the 3′ long terminal repeat of Rous sarcoma virus (Yamamoto et al., Cell 22:787-797 (1980)), the herpes thymidine kinase promoter (Wagner et al., Proc. Natl. Acad. Sci. USA 78:1441-1445 (1981)), the regulatory sequences of the metallothionein gene (Brinster et al., Nature 296:39-42 (1982)); prokaryotic expression vectors such as the β-lactamase promoter (Jay et al., Proc. Natl. Acad. Sci. USA 78:5543 (1981)) or the tac promoter (DeBoer et al., Proc. Natl. Acad. Sci. USA 80:21-25 (1983); see also “Useful Proteins from Recombinant Bacteria”: in Scientific American 242:74-94 (1980)); plant expression vectors containing the nopaline synthetase promoter (Herrera-Estrella et al., Nature 303:209-213 (1984)) or the cauliflower mosaic virus 35S RNA promoter (Gardner et al., Nucleic Acids Res. 9:2871 (1981)), and the promoter of the photosynthetic enzyme ribulose bisphosphate carboxylase (Herrera-Estrella et al., Nature 310:115-120 (1984)); promoter elements from yeast and other fungi such as the Gal4 promoter, the alcohol dehydrogenase promoter, the phosphoglycerol kinase promoter, the alkaline phosphatase promoter, and the following animal transcriptional control regions that exhibit tissue specificity and have been used in transgenic animals: elastase I gene control region which is active in pancreatic acinar cells (Swift et al., Cell 38:639-646 (1984); Omitz et al., Cold Spring Harbor Symp. Quant. Biol. 50:399-409 (1986); MacDonald, Hepatology 7:425-515 (1987)); insulin gene control region which is active in pancreatic beta cells (Hanahan et al., Nature 315:115-122 (1985)), immunoglobulin gene control region which is active in lymphoid cells (Grosschedl et al., Cell 38:647-658 (1984); Adams et al., Nature 318:533-538 (1985); Alexander et al., Mol. Cell Biol. 7:1436-1444 (1987)), mouse mammary tumor virus control region which is active in testicular, breast, lymphoid and mast cells (Leder et al., Cell 45:485-495 (1986)), albumin gene control region which is active in liver (Pinkert et al., Genes and Devel. 1:268-276 (1987)), alpha-fetoprotein gene control region which is active in liver (Krumlauf et al., Mol. Cell. Biol. 5:1639-1648 (1985); Hammer et al., Science 235:53-58 (1987)), alpha-1 antitrypsin gene control region which is active in liver (Kelsey et al., Genes and Devel. 1:161-171 (1987)), beta globin gene control region which is active in myeloid cells (Magram et al., Nature 315:338-340 (1985); Kollias et al., Cell 46:89-94 (1986)), myelin basic protein gene control region which is active in oligodendrocyte cells of the brain (Readhead et al., Cell 48:703-712 (1987)), myosin light chain-2 gene control region which is active in skeletal muscle (Shani, Nature 314:283-286 (1985)), and gonadotrophic releasing hormone gene control region which is active in gonadotrophs of the hypothalamus (Mason et al., Science 234:1372-1378 (1986)).

[0708] In a specific example, a vector is used that contains a promoter operably linked to nucleic acids encoding a desired protein, or a domain, fragment, derivative or homolog, thereof, one or more origins of replication, and optionally, one or more selectable markers (e.g., an antibiotic resistance gene). Exemplary plasmid vectors for transformation of E. coli cells, include, for example, the pQE expression vectors (available from Qiagen, Valencia, Calif.). pQE vectors enable placement of a 6×His tag at either the N- or C-terminus of the recombinant protein. Such plasmids include pQE32, pQE30, and pQE31 which provide multiple cloning sites for all three reading frames and provide for the expression of N-terminally 6×His-tagged proteins. (need to fill I w/pCMV stuff). Other exemplary plasmid vectors for transformation of E. coli cells include, for example, pD444-SR (DNA2.0, Menlo Park, Calif.), which contains an Isopropyl β-D-1-thiogalactopyranoside (IPTG) inducible T5 promoter, a strong ribosome bind site (RBS) and a pUC derived origin of replication. Other exemplary plasmid vectors for transformation of E. coli cells, include, for example, the pET expression vectors (see, U.S. Pat. No. 4,952,496; available from Novagen, Madison, Wis.; see, also literature published by Novagen describing the system). Such plasmids include pET11a, which contains the T7lac promoter, T7 terminator, the inducible E. coli lac operator, and the lac repressor gene; pET12a-c, which contains the T7 promoter, T7 terminator, and the E. coli ompT secretion signal; and pET15b and pET19b (Novagen, Madison, Wis.), which contain a His-Tag™ leader sequence for use in purification with a His column and a thrombin cleavage site that permits cleavage following purification over the column, the T7-lac promoter region and the T7 terminator.

[0709] Exemplary of a vector for mammalian cell expression is the pCMV-Script expression vector (Agilent Technologies, Santa Clara, Calif.; Cat. No. 212220). The pCMV-Script vector is derived from a high-copy-number pUC-based plasmid, and contains the human cytomegalovirus (CMV) immediate early promoter for constitutive expression of cloned inserts in a wide variety of cell lines. The vector contains DNA encoding the β-lactamase promoter and the SV40 early promoter linked to the neomycin/kanamycin resistance gene (neo/kan), an f1 origin of replication, a (CMV) immediate early promoter, an SV40 late polyadenylation signal (SV40), and the herpes simplex virus (HSV)-thymidine kinase (TK) polyA signal. Another example of a mammalian expression vector is the HZ24 expression vector, derived from the pCI vector backbone (Promega). It contains DNA encoding the Beta-lactamase resistance gene (AmpR), an F1 origin of replication, a Cytomegalovirus immediate-early enhancer/promoter region (CMV), and an SV40 late polyadenylation signal (SV40). The expression vector also has an internal ribosome entry site (IRES) from the ECMV virus (Clontech) and the mouse dihydrofolate reductase (DHFR) gene.

[0710] Any of the ADA2 variants provided herein also can be encoded in expression vectors for in vivo expression, particularly tumor targeted or oncolytic vectors for expression in tumor cells. Vectors for in vivo expression include oncolytic vectors for delivery to tumors and expression therein or targeted for delivery to other cells and tissues, or gene therapy vectors. Oncolytic vectors for delivery include viral vectors for Newcastle Disease virus, parvovirus, vaccinia virus, reovirus, measles virus, vesicular stomatitis virus (VSV), oncolytic adenoviruses and herpes viruses. Oncolytic viral vectors for targeted delivery are well known to one of skill in the art and include, for example, vesicular stomatitis virus, see, e.g., U.S. Pat. Nos. 7,731,974, 7,153,510, 6,653,103 and U.S. Pat. Pub. Nos. 2010/0178684, 2010/0172877, 2010/0113567, 2007/0098743, 20050260601, 20050220818 and EP Pat. Nos. 1385466, 1606411 and 1520175; herpes simplex virus, see, e.g., U.S. Pat. Nos. 7,897,146, 7,731,952, 7,550,296, 7,537,924, 6,723,316, 6,428,968 and U.S. Pat. Pub. Nos. 2011/0177032, 2011/0158948, 2010/0092515, 2009/0274728, 2009/0285860, 2009/0215147, 2009/0010889, 2007/0110720, 2006/0039894 and 20040009604; retroviruses, see, e.g., U.S. Pat. Nos. 6,689,871, 6,635,472, 6,639,139, 5,851,529, 5,716,826, 5,716,613 and U.S. Pat. Pub. No. 20110212530; and adeno-associated viruses, see, e.g., U.S. Pat. Nos. 8,007,780, 7,968,340, 7,943,374, 7,906,111, 7,927,585, 7,811,814, 7,662,627, 7,241,447, 7,238,526, 7,172,893, 7,033,826, 7,001,765, 6,897,045, and 6,632,670. The vectors can be introduced into cells for cell therapy, such as immune cells for immunotherapy as described herein.

[0711] The vectors for targeted delivery of any of the ADA2 variants provided herein can also encode additional agents, such as agents for combination therapies that are proteins or polypeptides, for example, other immunomodulatory agents, chemotherapeutic agents, immune checkpoint inhibitors or hyaluronan-degrading enzyme, such as a soluble hyaluronidase or polymer-conjugated soluble hyaluronidase (e.g. PEGPH20). For example, in addition to any of the ADA2 variants provided herein, hyaluronan degrading enzymes can be encoded in expression vectors for in vivo expression, particularly tumor targeted or oncolytic vectors for expression in tumor cells (see, e.g., U.S. Pat. No. 8,450,470, and U.S. Patent Pub. No. 2011/0152359; see also U.S. Patent Pub. No. 2012/0148535).

[0712] Immune Cells that Encode and Express the ADA2 Variants Provided Herein

[0713] Any of the modified adenosine deaminase 2 (ADA2) variants provided herein can be employed in methods of adoptive immunotherapy. Methods for adoptive immunotherapy using immune cells modified to express a therapeutic protein or other protein, and optionally other proteins and receptors that increase immune response to overcome the immunosuppressive effect of cancers and/or to target the immune cells to specific cells are well known to those of skill in the art. Accordingly, provided are immune cells that encode one or more of the ADA2 variants provided herein, and optionally additional molecules to enhance tumor targeting and immune responses, particularly to overcome the immunosuppressive effect of certain tumors. The immune cells include, but are not limited to, tumor-infiltrating lymphocytes (TIL), cytotoxic T lymphocytes (CTL), natural killer (NK) cells, lymphokine-activated killer (LAK) cells, and immune cells, such as T-cells, that express chimeric antigen receptor (CAR).

[0714] Methods for immunotherapy by administration of immune cells are well known. Immune cells, which can be autologous or heterologous, but typically are autologous cells harvested from the subject to be treated, modified to express nucleic acid encoding any one or more of the ADA2 variants provided herein, and treated to remove tumor cells as needed, and expanded, if necessary. Nucleic acid can be introduced, for example, in an expression vector or in a vector or artificial chromosome that results in incorporation of the DNA encoding the ADA2 variant(s) into a chromosome or chromosomes of the immune cells. The immune cells are cultured, expanded and introduced into a subject having a tumor for treatment. In some embodiments, the immune cells are targeted to tumor cells. For example, in some embodiments, the cells encode an ADA2 variant and also express a chimeric antigen receptor (CAR). Cells containing CARs targeted to particular tumor antigens and methods for preparing such cells are known to those of skill in the art (see, e.g., International PCT Pub. No. WO 2014/186469).

[0715] CARs are well known, see e.g., any of International PCT Pub. Nos. WO 2012/031744, WO 2012/079000, WO 2013/059593, WO 2015/112626, WO 2014/011988 and U.S. Pat. No. 8,465,743, which describe CARs and cells expressing them and the uses thereof and improvements thereof, see also U.S. Patent Pub. No. US 20150064154, which describes cells and expression systems for producing immune cells that target tumors for use in cell therapy. The cell can be transfected, transduced or otherwise modified to express these heterologous proteins using standard methods known to those of skill in the art. The CAR can be engineered to target any tumor cell antigen of interest, including, but not limited to, HER2, CD19, HERV-K, CD20, CD22, ROR1, mesothelin, CD33/IL3Ra, c-Met, PSMA, Glycolipid F77, EGFRvIII, GD-2, NY-ESO-1 TCR, MAGE A3 TCR and GD2 and combinations thereof. Exemplary tumor antigens recognized by CARs are known to those of skill in the art (see, e.g., Renkvist et al. Cancer Immunol Immunother. 50(1):3-15 (2001) and Novelino et al. Cancer Immunol Immunother. 54(3):187-207 (2005)). The antigen binding region can include, for example, a fragment of the VH and VL chains of a single-chain variable fragment (scFv) derived from a particular human monoclonal antibody specific for a tumor cell antigen or can include a plurality of antigen binding domains of a human antigen-specific antibody. The scFv, for example can be linked to a flexible transmembrane domain followed by a tyrosine-based activation motif (see, e.g., Sadelain et al. Curr Opin. Immunol. 21, 215-223 (2009)). CARs can include additional activation domains from co-stimulatory molecules such as CD28 and CD137 to enhance T cell survival and proliferation. The CARs and/or cells expressing them can further encode and express a costimulatory signaling regions that include, for example, intracellular domain of a costimulatory molecule, such as the intracellular domain of CD27, CD28, 4-1BB, OX40, CD30, CD40, PD-1, lymphocyte function-associated antigen-1 (LFA-1), CD2, CD7, LIGHT, NKG2C, B7-H3, a ligand that specifically binds with CD83, and any combination thereof.

[0716] A variety of CAR constructs and expression vectors for the same are known in the art. The expression vector can be one that remains episomal, or one that results in incorporation of nucleic acid encoding the CAR and/or the ADA2 variant into a chromosome, such as by homologous integration or by inclusion of transposon sequences, such that the presence of a transposase allows the coding sequence to integrate into a chromosome of a transfected cell. The nucleic acid encoding the ADA2 variant and CAR can be incorporated into the same vector or can be introduced in separate vectors. If transposon(s) are used, the cells can express a transposase that facilitates integration of the nucleic acid encoding the CAR and/or ADA2 variant into a chromosome of the transfected cells. Transposon systems are known (see, e.g., International PCT Pub. No. WO 2014/186469). The transposase can be provided in a DNA expression vector or as an expressible RNA or a protein for transient expression. Transposon systems are known to those of skill in the art such that long-term expression of the transposase does not occur in the transgenic cells. Any transposase system can be used in accordance with the embodiments. In other aspects, cells can be infected with a lentivirus to facilitate integration of the CAR coding sequence and the nucleic acid sequence that encodes the ADA2 variant into the genome of the cell.

[0717] 4. Expression

[0718] Any adenosine deaminase 2 (ADA2) polypeptides including variant ADA2 polypeptides, can be produced by any method known to those of skill in the art including in vivo and in vitro methods. Desired proteins can be expressed in any organism suitable to produce the required amounts and forms of the proteins, such as for example, the amounts and forms needed for administration and treatment. Expression hosts include prokaryotic and eukaryotic organisms such as E. coli, yeast, plants, insect cells, mammalian cells, including human cell lines and transgenic animals. Expression hosts can differ in their protein production levels as well as the types of post-translational modifications that are present on the expressed proteins. The choice of expression host can be made based on these and other factors, such as regulatory and safety considerations, production costs and the need and methods for purification. Any of the ADA2 variants provided herein also can be encoded in expression vectors for in vivo expression, particularly tumor targeted or oncolytic vectors for expression in tumor cells.

[0719] Many expression vectors are available and known to those of skill in the art and can be used for expression of proteins. The choice of expression vector will be influenced by the choice of host expression system. In general, expression vectors can include transcriptional promoters and optionally enhancers, translational signals, and transcriptional and translational termination signals. Expression vectors that are used for stable transformation typically have a selectable marker which allows selection and maintenance of the transformed cells. In some cases, an origin of replication can be used to amplify the copy number of the vector.

[0720] The ADA2 polypeptides, including variant ADA2 polypeptides, also can be utilized or expressed as protein fusions. For example, an enzyme fusion can be generated to add additional functionality to an enzyme. Examples of enzyme fusion proteins include, but are not limited to, fusions of a signal sequence, a tag such as for localization, e.g., a His₆ tag or a FLAG™ tag, or a tag for purification, for example, a GST fusion, and a sequence for directing protein secretion and/or membrane association.

[0721] a. Prokaryotic Cells

[0722] Prokaryotes, especially Escherichia coli, provide a system for producing large amounts of proteins. Transformation of E. coli is a simple and rapid technique well known to those of skill in the art. Expression vectors for E. coli can contain inducible promoters, such promoters are useful for inducing high levels of protein expression and for expressing proteins that exhibit some toxicity to the host cells. Examples of inducible promoters include the lac promoter, the trp promoter, the hybrid tac promoter, the T7 and SP6 RNA promoters and the temperature regulated λPL promoter.

[0723] Proteins, such as any provided herein, can be expressed in the cytoplasmic environment of E. coli. The cytoplasm is a reducing environment and for some molecules, this can result in the formation of insoluble inclusion bodies. Reducing agents such as dithiothreitol and β-mercaptoethanol and denaturants, such as guanidine-HCl and urea can be used to resolubilize the proteins. An alternative approach is the expression of proteins in the periplasmic space of bacteria which provides an oxidizing environment and chaperonin-like and disulfide isomerases and can lead to the production of soluble protein. Typically, a leader sequence is fused to the protein to be expressed which directs the protein to the periplasm. The leader is then removed by signal peptidases inside the periplasm. Examples of periplasmic-targeting leader sequences include the pelB leader from the pectate lyase gene and the leader derived from the alkaline phosphatase gene. In some cases, periplasmic expression allows leakage of the expressed protein into the culture medium. The secretion of proteins allows quick and simple purification from the culture supernatant. Proteins that are not secreted can be obtained from the periplasm by osmotic lysis. Similar to cytoplasmic expression, in some cases proteins can become insoluble and denaturants and reducing agents can be used to facilitate solubilization and refolding. Temperature of induction and growth also can influence expression levels and solubility, typically temperatures between 25° C. and 37° C. are used. Typically, bacteria produce aglycosylated proteins. Thus, if proteins require glycosylation for function, glycosylation can be added in vitro after purification from host cells.

[0724] b. Yeast Cells

[0725] Yeasts such as Saccharomyces cerevisae, Schizosaccharomyces pombe, Yarrowia lipolytica, Kluyveromyces lactis and Pichia pastoris are well known yeast expression hosts that can be used for production of proteins, such as any described herein. Yeast can be transformed with episomal replicating vectors or by stable chromosomal integration by homologous recombination. Typically, inducible promoters are used to regulate gene expression. Examples of such promoters include GAL1, GAL7 and GAL5 and metallothionein promoters, such as CUP1, AOX1 or other Pichia or other yeast promoter. Expression vectors often include a selectable marker such as LEU2, TRP1, HIS3 and URA3 for selection and maintenance of the transformed DNA. Proteins expressed in yeast are often soluble. Co-expression with chaperonins such as Bip and protein disulfide isomerase can improve expression levels and solubility. Additionally, proteins expressed in yeast can be directed for secretion using secretion signal peptide fusions such as the yeast mating type alpha-factor secretion signal from Saccharomyces cerevisae and fusions with yeast cell surface proteins such as the Aga2p mating adhesion receptor or the Arxula adeninivorans glucoamylase. A protease cleavage site such as for the Kex-2 protease, can be engineered to remove the fused sequences from the expressed polypeptides as they exit the secretion pathway. Yeast also is capable of glycosylation at Asn-X-Ser/Thr motifs.

[0726] c. Insect Cells

[0727] Insect cells, particularly using baculovirus expression, are useful for expressing polypeptides such as any ADA2 polypeptides or variants. Insect cells express high levels of protein and are capable of most of the post-translational modifications used by higher eukaryotes. Baculovirus have a restrictive host range which improves the safety and reduces regulatory concerns of eukaryotic expression. Typical expression vectors use a promoter for high level expression such as the polyhedrin promoter of baculovirus. Commonly used baculovirus systems include the baculoviruses such as Autographa californica nuclear polyhedrosis virus (AcNPV), and the Bombyx mori nuclear polyhedrosis virus (BmNPV) and an insect cell line such as Sf9 derived from Spodoptera frugiperda, Pseudaletia unipuncta (A7S) and Danaus plexippus (DpN1). For high-level expression, the nucleotide sequence of the molecule to be expressed is fused immediately downstream of the polyhedrin initiation codon of the virus. Mammalian secretion signals are accurately processed in insect cells and can be used to secrete the expressed protein into the culture medium. In addition, the cell lines Pseudaletia unipuncta (A7S) and Danaus plexippus (DpN1) produce proteins with glycosylation patterns similar to mammalian cell systems.

[0728] An alternative expression system in insect cells is the use of stably transformed cells. Cell lines such as the Schneider 2 (S2) and Kc cells (Drosophila melanogaster) and C7 cells (Aedes albopictus) can be used for expression. The Drosophila metallothionein promoter can be used to induce high levels of expression in the presence of heavy metal induction with cadmium or copper. Expression vectors are typically maintained by the use of selectable markers such as neomycin and hygromycin.

[0729] d. Mammalian Cells

[0730] Mammalian expression systems can be used to express proteins including any ADA2 polypeptides, including variant ADA2 polypeptides. Expression constructs can be transferred to mammalian cells by viral infection such as adenovirus or by direct DNA transfer such as liposomes, calcium phosphate, DEAE-dextran and by physical means such as electroporation and microinjection. Expression vectors for mammalian cells typically include an mRNA cap site, a TATA box, a translational initiation sequence (Kozak consensus sequence) and polyadenylation elements. IRES elements also can be added to permit bicistronic expression with another gene, such as a selectable marker. Such vectors often include transcriptional promoter-enhancers for high-level expression, for example the SV40 promoter-enhancer, the human cytomegalovirus (CMV) promoter and the long terminal repeat of Rous sarcoma virus (RSV). These promoter-enhancers are active in many cell types. Tissue and cell-type promoters and enhancer regions also can be used for expression. Exemplary promoter/enhancer regions include, but are not limited to, those from genes such as elastase I, insulin, immunoglobulin, mouse mammary tumor virus, albumin, alpha fetoprotein, alpha 1 antitrypsin, beta globin, myelin basic protein, myosin light chain 2, and gonadotropic releasing hormone gene control. Selectable markers can be used to select for and maintain cells with the expression construct. Examples of selectable marker genes include, but are not limited to, hygromycin B phosphotransferase, adenosine deaminase, xanthine-guanine phosphoribosyl transferase, aminoglycoside phosphotransferase, dihydrofolate reductase (DHFR) and thymidine kinase. For example, expression can be performed in the presence of methotrexate to select for only those cells expressing the DHFR gene. Fusion with cell surface signaling molecules such as TCR-ζ and Fc_{ε}RI-γ can direct expression of the proteins in an active state on the cell surface.

[0731] Many cell lines are available for mammalian expression including mouse, rat human, monkey, chicken and hamster cells. Exemplary cell lines include but are not limited to CHO, Balb/3T3, HeLa, MT2, mouse NSO (nonsecreting) and other myeloma cell lines, hybridoma and heterohybridoma cell lines, lymphocytes, fibroblasts, Sp2/0, COS, NIH3T3, HEK293, 293S, 2B8, and HKB cells. Cell lines also are available adapted to serum-free media which facilitate purification of secreted proteins from the cell culture media. Examples include CHO-S cells (Invitrogen, Carlsbad, Calif., cat #11619-012) and the serum free EBNA-1 cell line (Pham et al., (2003) Biotechnol. Bioeng. 84:332-342). Cell lines also are available that are adapted to grow in special media optimized for maximal expression. For example, DG44 CHO cells are adapted to grow in suspension culture in a chemically defined, animal product-free medium.

[0732] e. Plants

[0733] Transgenic plant cells and plants can be used to express proteins such as any described herein. Expression constructs are typically transferred to plants using direct DNA transfer such as microprojectile bombardment and PEG-mediated transfer into protoplasts, and with agrobacterium-mediated transformation. Expression vectors can include promoter and enhancer sequences, transcriptional termination elements and translational control elements. Expression vectors and transformation techniques are usually divided between dicot hosts, such as Arabidopsis and tobacco, and monocot hosts, such as corn and rice. Examples of plant promoters used for expression include the cauliflower mosaic virus promoter, the nopaline synthetase promoter, the ribose bisphosphate carboxylase promoter and the ubiquitin and UBQ3 promoters. Selectable markers such as hygromycin, phosphomannose isomerase and neomycin phosphotransferase are often used to facilitate selection and maintenance of transformed cells. Transformed plant cells can be maintained in culture as cells, aggregates (callus tissue) or regenerated into whole plants. Transgenic plant cells also can include algae engineered to produce any ADA2 polypeptides. Because plants have different glycosylation patterns than mammalian cells, this can influence the choice of protein produced in these hosts.

[0734] 5. Purification Techniques

[0735] Method for purification of polypeptides, including any ADA2 polypeptides, including variant ADA2 polypeptides, from host cells will depend on the chosen host cells and expression systems. For secreted molecules, proteins are generally purified from the culture media after removing the cells. For intracellular expression, cells can be lysed and the proteins purified from the extract. When transgenic organisms such as transgenic plants and animals are used for expression, tissues or organs can be used as starting material to make a lysed cell extract. Additionally, transgenic animal production can include the production of polypeptides in milk or eggs, which can be collected, and if necessary, the proteins can be extracted and further purified using standard methods in the art.

[0736] Proteins, such as ADA2 polypeptides, can be purified using standard protein purification techniques known in the art including but not limited to, SDS-PAGE, size fraction and size exclusion chromatography, ammonium sulfate precipitation and ionic exchange chromatography, such as anion exchange chromatography. Affinity purification techniques also can be utilized to improve the efficiency and purity of the preparations. For example, antibodies, receptors and other molecules that bind ADA2 enzymes can be used in affinity purification. Expression constructs also can be engineered to add an affinity tag to a protein such as a FLAG™ epitope, GST fusion or His₆ and affinity purified with an anti-FLAG™ antibody, glutathione resin and Ni-resin, respectively.

[0737] When proteins are expressed by transformed bacteria in large amounts, typically after promoter induction, although expression can be constitutive, the polypeptides can form insoluble aggregates. There are several protocols that are suitable for purification of polypeptide inclusion bodies known to one of skill in the art. Numerous variations will be apparent to those of skill in the art. For example, in one method, the cell suspension is generally centrifuged and the pellet containing the inclusion bodies resuspended in buffer which does not dissolve but washes the inclusion bodies, e.g., 20 mM Tris-HCl (pH 7.2), 1 mM EDTA, 150 mM NaCl and 2% Triton-X 100, a non-ionic detergent. It can be necessary to repeat the wash step to remove as much cellular debris as possible. The remaining pellet of inclusion bodies can be resuspended in an appropriate buffer (e.g., 20 mM sodium phosphate, pH 6.8, 150 mM NaCl). Other appropriate buffers are apparent to those of skill in the art.

[0738] Alternatively, proteins can be purified from bacteria periplasm. Where the protein is exported into the periplasm of the bacteria, the periplasmic fraction of the bacteria can be isolated by cold osmotic shock in addition to other methods known to those of skill in the art. For example, in one method, to isolate recombinant polypeptides from the periplasm, the bacterial cells are centrifuged to form a pellet. The pellet can be resuspended in a suitable buffer containing 20% sucrose. To lyse the cells, the bacteria can be centrifuged and the pellet resuspended in ice-cold 5 mM MgSO₄ and kept in an ice bath for approximately 10 minutes. The cell suspension is centrifuged and the supernatant decanted and saved. Recombinant proteins present in the supernatant can be separated from the host proteins by standard separation techniques well known to those of skill in the art, such as the separation techniques described herein. These methods include, but are not limited to, the following steps: solubility fractionation, size differential filtration, and column chromatography.

[0739] ADA2 protein molecules having a molecular weight of from or from about 95 kDa to 120 kDa, and generally from or from about 100 kDa to 110 kDa, inclusive, can be collected and purified. When in monomer form, or when assessed under reducing conditions on an SDS PAGE gel, the molecular weight of ADA2 is generally from or from about 50 kDa to 60 kDa, such as generally from or from about 57 kDa to 59 kDa. It is understood that variants or other modified forms can exhibit higher or lower molecular weights. For example, typically hyperglycosylated variants or conjugates as provided herein can exhibit higher molecular weights.

[0740] Purity can be assessed by any method known in the art including gel electrophoresis and staining and spectrophotometric techniques. Any ADA2 polypeptides, including variant ADA2 polypeptides, can be purified to 60%, 70%, 80% purity and typically at least 90%, 91%, 92%, 93%, 94%, 95%, 96%, 97%, 98% or 99% purity. Purity can be assessed by standard methods such as by SDS-PAGE and Coomassie staining.

### F. METHODS OF ASSESSING ACTIVITY AND PHYSICAL PROPERTIES OF ADA2

[0741] Assays can be used to assess the physical properties, stability and/or activity of any of the ADA2 protein molecules provided herein, including wildtype and variants and modified forms thereof. The properties and activities can be related to biological activities and/or tumor treatment activities. The assays can be performed in vitro or in vivo. For example, the assays can be used to assess the adenosine deaminase activity of the ADA2, heparin binding, thermal stability, pH optima, pharmacokinetics, tumor growth inhibitor activity and other activities and properties. In another example, the assays can be used to assess the effects of administering any ADA2 provided herein, including effects of dose and route of administration. The assays also can be used make minor adjustments to the formulations provided herein while retaining the activity of ADA2 for therapeutic use. Such assays are well known to a skilled artisan. Non-limiting exemplary assays are described in the following subsections.

[0742] 1. Adenosine Deaminase Assay

[0743] The adenosine deaminase (ADA; EC 3.5.4.4) activity of any of the ADA2 described herein, including a wildtype, variant or conjugate, can be assessed using methods well known in the art. ADA activity assays commonly measure, directly or indirectly, the rate of production a product of the enzymatic reaction. For example, the production of inosine or ammonia can be directly or indirectly measured. In other examples, the decrease of the substrate of the enzyme, e.g., adenosine or 2-deoxyadenosine, is measured. The decrease of the substrate, or the increase of the product, can be measured directly by spectrophotometry, or indirectly, by subsequent enzymatic or oxidation-reduction reactions that use chromogenic substrates or change the absorbance spectra of the reaction.

[0744] For example, some commercially available adenosine deaminase (ADA) assays, such as ADA assay kits available from BQ Kits (San Diego, Calif.; Cat. No. BQ014EALD) and Diazyme (Poway, Calif.; Cat. No. DZ117A-K), utilize colorimetric substrate and spectrophotometric reading to determine the conversion of adenosine to inosine by ADA enzymes. In these assays, the production of inosine is detected by multi-step enzymatic reactions that produce a chromogenic dye. Enzymatic deamination of adenosine produces inosine, which is converted to hypoxanthine by the inosine-specific purine nucleoside phosphorylase (PNP; EC 2.4.2.1) present in the reaction. Hypoxanthine is then converted to uric acid and hydrogen peroxide (H₂02) by xanthine oxidase (XOD; EC 1.1.3.22). H₂O₂ is further reacted with N-Ethyl-N-(2-hydroxy-3-sulfopropyl)-3-methylaniline (EHSPT) and 4-aminoantipyrine (4-AA) in the presence of peroxidase (POD) to generate a quinone dye which is detectable in a kinetic manner using a UV spectrophotometer at 556 nm. Bovine liver adenosine deaminase can be used as standards. The change in absorbance at 556 nm (ΔA₅₅₆) overtime, at 37° C., is measured. One unit of ADA is defined as the amount of ADA that generates one μmole of inosine from adenosine per minute at 37° C. Adenosine deaminase activity in mU/mL is calculated using the following formula:

1 mU/mL=(ΔA₅₅₆/min×Tᵥ)/(Sᵥ×ε×1)

[0745] where Tᵥ=total volume of reaction; Sᵥ=sample volume, ε=32.2×10⁻³ M⁻¹cm⁻¹, 1=0.5 cm.

[0746] ADA activity can be visualized using other colorimetric methods (see, e.g., Manchenko, G. P., Handbook of Detection of Enzymes on Electrophoretic Gels, CRC Press, pp. 453-454). For example, the H₂02 produced in the ADA assay described above, can be visualized by the addition of phenazine methosulfate (PMS), which is converted to dihydroPMS by H₂O₂,then the dihydroPMS converts nitro blue tetrazolium chloride (NBT) to formazan. Absorbance of formazan can be determined at 570 nm.

[0747] Another method to measure ADA activity is by measuring the release of ammonia from adenosine, when it is deaminated to form inosine. Ammonia release can be measured using commercially available kits, such as the Ammonia Assay kit (Cat. No. A0853, Sigma-Aldrich, St. Louis, Mo.). The kit contains dry reagents containing α-ketoglutaric acid and NADPH. Ammonia reacts with α-ketogluaric acid (KGA) and reduced nicotinamide adenine dinucleotide phosphate (NADPH) in the presence of L-glutamate dehydrogenase (GDH; Cat. No. G2294, Sigma-Aldrich). The decrease in absorbance at 340 nm, due to the oxidation of NADPH to NADP+, is proportional to the ammonia concentration, and hence the adenosine deaminase activity. The decrease in absorbance can be measured using a spectrophotometer. Adenosine deaminase activity in mU/mL (μM/min equivalent) is calculated using the following formula:

1 mU/mL=(ΔA/min×Tᵥ)/(Sᵥ×ε×1)

[0748] where Tᵥ=total volume, Sᵥ=sample volume, ε=6.22×10⁻³ μM⁻¹cm⁻¹, 1=1 cm.

[0749] Other spectrophotometry-based adenosine deaminase assays include the continuous optical assay, which directly measures the changes in adenosine absorbance. Absorbance of adenosine can be measured at 265 nm, and the decrease of absorbance at 265 nm, as adenosine is deaminated to inosine, is measured overtime. The samples are prepared in a 100 mM potassium phosphate buffer, pH 7.5 at 25° C. containing 0.1% (w/v) bovine serum albumin (BSA), and is incubated with 1.35 mM adenosine solution, pH 7.0 at 25° C. The decrease in absorbance at 265 nm (ΔA₂₆₅) is measured for approximately 5 minutes. In this assay, ADA activity in U/mL is calculated using the following formula:

Units/mL enzyme=(ΔA₂₆₅/min)(Tᵥ)(df))/(8.1)(V_{E})
[0750] where Tᵥ=Total volume (in mL) of assay; df=Dilution Factor; 8.1=Millimolar extinction coefficient of adenosine at 265 nm; V_{E}=Volume (in milliliters) of enzyme used.

[0751] One unit will deaminate 1.0 μmole of adenosine to inosine per minute at pH 7.5 at 25° C. Such method can be performed in a larger scale format such as in a 96-well microtiter plate format (see, for example, Lu et al. (2012) Clinica Chimica Acta 413:1637-1640).

[0752] A variation of this method can be used, with necessary corrections made to the absorbance measurements. UV absorption peak of adenosine and inosine are at 261 nm and 249 nm, respectively, and the spectra overlap significantly. During the deamination reaction, the absorbance of Adenosine decreases while that of inosine increases with time. To determine the relative adenosine, whose spectra overlap with that of inosine, two spectrophotometric measurements are made. The isosbestic point, where adenosine and inosine have the same extinction coefficient and remains unchanged, is at 253 nm, and is concentration independent. The isosbestic point is also measured as the reference point to correct for volume or intensity discrepancies. The ratio of absorbance at 261 nm/absorbance at 253 nm (A₂₆₁/A₂₅₃) is used to measure changes in adenosine concentration, based on a standard curve.

[0753] 2. Methods of Assessing Heparin Binding

[0754] Heparin binding, or binding to another GAG, by any ADA2 described herein, including a wildtype, variant or conjugate, can be assessed using methods well known in the art. These methods and other methods known in the art to assess binding to GAGs, can be used to assess binding and/or select ADA2 variants with altered heparin binding, e.g. attenuated heparin binding or increased heparin binding. Generally, heparin-binding is sensitive to the presence of metal ions, urea, and detergents (anionic, nonionic, and zwitterionic). Ca²⁺ and Mg²⁺ and the zwitterionic detergent 3-[(3-cholamidopropyl)dimethylammonio]-1-propanesulfonate increases heparin binding. The presence of NaCl, urea, sodium dodecylsulfate, and La³⁺ reduces heparin binding.

[0755] a. Affinity Assay

[0756] The ability of ADA2 to bind heparin can be assessed using affinity binding assays with immobilized heparin. Heparin is a highly sulfated glycosaminoglycan, and is widely used as a general affinity ligand. Its high degree of sulfation imparts a strong acidic nature to the molecule, therefore it binds many substances, including ADA2, by ionic interaction. In addition, heparin contains unique carbohydrate sequences, which act as specific binding sites for some proteins. Columns containing immobilized heparin are used to assess binding of and purify proteins with high affinity for heparin, such as DNA-binding proteins, coagulation factors, lipoproteins, and protein synthesis factors. For example, commercially available heparin resin columns, such as HiTrap Heparin HP loaded with heparin-Sepharose™ resin (GE Healthcare, Pittsburgh, Pa.; Cat. No. 17-0998-01), can be used to assess binding of a specific protein, such as ADA2. In the heparin-Sepharose™ resin, heparin is coupled to the Sepharose High Performance base matrix via the N-hydroxysuccinamide coupling method, to provide high capacity, performance, and low leakage levels.

[0757] Heparin binding can be assessed by an affinity assay using the heparin-Sepharose™ resin. In such an exemplary assay, 35 μL of ADA2, wildtype or variants, is mixed with 20 μL heparin-Sepharose™ resin (GE Healthcare, Pittsburgh, Pa.; Cat. No. 17-0998-01), followed by incubating at room temperature for 30 min. The mixture is then centrifuged through a 0.22 μm centrifuge filter and the flow-through, containing the unbound protein, is collected for analysis on an SDS-PAGE gel. 35 μL of 1.5 M NaCl is added to heparin-Sepharose resin and incubated at room temperature (RT) for 10 min to elute the remaining heparin-bound protein from the heparin-Sepharose. Degree of heparin binding is assessed by SDS-PAGE, by comparing the amount of ADA2, wildtype and variants, bound to the resins and the flowthrough to the amount in the input.

[0758] b. ELISA Assay

[0759] Heparin binding of a protein, such as any ADA2 provided herein, can also be assessed using enzyme-linked immunosorbent assay (ELISA) based methods. ELISA-based methods use heparin immobilized on a surface, such as a microtiter plate. The protein of interest which binds to heparin, such as any ADA2 provided herein, is incubated in the heparin coated plate, and binding is detected using antibodies that detect the protein of interest, such as any ADA2 provided herein.

[0760] For example, a 96-well plate coated with 100 μL of 200 μg/mL heparin sodium salt (Calibochem, EMD Millipore, Billerica, Mass.; Cat. No. 375095) in Na₂CO₃ buffer (pH 9.6) can be used to test ADA2 binding to heparin. After binding of ADA2, such as wildtype or variants or modified forms thereof, the wells are washed and incubated with a horseradish peroxidase (HRP)-conjugated detection antibody, e.g., HRP-anti-FLAG antibody (Abcam, Cambridge, UK; Cat. No. Ab1238) to detect the FLAG tag on the protein of interest, such as any ADA2 provided herein. After incubation and washing, the degree of binding of the protein of interest to the immobilized heparin on the plate is visualized by a chromogenic substrate, such as 3,3′,5,5′-Tetramethylbenzidine (TMB) substrate solution (Pierce, Thermo Fisher Scientific, Rockford, Ill.) for HRP, is added for color development. The optical density (OD) of each reaction is measured on a plate reader.

[0761] In another example, heparin is immobilized by incubating Streptavidin-coated microtiter plates, such as the Streptavidin-coated 96-well plate (Thermo Fisher Scientific, Rockford, Ill.; Cat. No. 15520), with biotinylated heparin, such as biotin-heparin (Sigma-Aldrich, St. Louis, Mo.; Cat No. B9806-10MG). After binding of ADA2, wildtype or variants or modified forms thereof, the wells are washed and incubated with a horseradish peroxidase (HRP)-conjugated detection antibody, e.g., HRP-anti-FLAG antibody (Abcam, Cambridge, UK; Cat. No. Ab1238) to detect the FLAG tag on the protein of interest, such as any ADA2 provided herein. After incubation and washing, the degree of binding of the protein of interest to the immobilized heparin on the plate is visualized by a chromogenic substrate, such as 3,3′,5,5′-Tetramethylbenzidine (TMB) substrate solution (Pierce, Thermo Fisher Scientific, Rockford, Ill.) for HRP, is added for color development. The optical density (OD) of each reaction is measured on a plate reader.

[0762] Any variations of these methods known in the art can also be used. For example, it is within the level of one of skill in the art to select a suitable solid support depending on the particular assay conditions, such as a particular pH condition. Nickel coated microplates can be less suitable for binding of His-tagged proteins, since buffer pH can affect antigen coating to Ni-coated but not high-bind plates. In addition, various methods can be used to immobilize heparin to the plate, such as conjugation with bovine serum albumin (BSA) or other carriers coating with protamine sulfate with an excess of heparin.

[0763] Buffers, blocking solutions and reaction conditions can also be selected based on the desired binding assay. For example, blocking solutions include those containing human, bovine, horse or other serum albumin or gelatin. Blocking of a solid support, such as a plate, can be performed using a binding assay buffer to which one or more blocking agents are added. Exemplary blocking agents include 1-5% Bovine Serum Albumin (BSA), 1-5% non-fat dry milk, 0.1-1% gelatin and 25% human serum. Detergents, such as Tween-20, and preservatives, such as thimerosal, can be added to the blocking solution. Binding assay buffers include i.e. the tumor microenvironment buffer or the normal physiologic buffer. The aqueous protein solution-solid support mixture is typically maintained for a time period of 30 minutes, 1 hour, or longer, and can vary as a function of the temperature. The blocking reaction can be performed at any temperature, and generally can be performed 4° C.-37° C., such as 4° C., room temperature (i.e., 22° C.) or 37° C. In some examples, the reaction is allowed to proceed for at least one hour at a temperature of about 4° C.-37° C. For example, blocking can be achieved at room temperature for one hour. After incubation and blocking, the resulting solid phase can be thereafter rinsed free of unbound protein prior to contact with the test molecule (e.g. ADA2 wildtype, variants and modified forms provided herein).

[0764] Examples of enzyme labels include horseradish peroxidase, alkaline phosphatase, and β-D-galactosidase. Examples of enzyme substrates that can be added to develop the signal include PNPP (p-Nitrophenyl Phosphate, Disodium Salt), ABTS (2,2′-Azinobis [3-ethylbenzothiazoline-6-sulfonic acid]-diammonium salt), OPD (o-phenylenediamine dihydrochloride), and TMB (3,3′,5,5′-tetramethylbenzidine) (SOMA Labs, Romeo, Mich.), including Sureblue TMB Microwell Peroxidase Substrate 1-component (KPL, #52-00-03). The reaction can be stopped by adding a stopping reagent (e.g. TMB stop solution). The absorbance at a suitable wavelength (i.e. 450 nm) can be determined.

[0765] For fluorescence, a large number of fluorometers are available. For chemiluminescence detection, such as detection of horseradish peroxidase (HRP) substrates, luminometers or films are available. With enzymes, a fluorescent, chemiluminescent, or colored product can be determined or measured fluorometrically, luminometrically, spectrophotometrically or visually. For example, an anti-tag reagent can be conjugated to horseradish peroxidase (HRP) or other detectable agent.

[0766] Detection can be facilitated by the presence of a fluorescent, radioactive or other detectable moiety. For example, any ADA2 polypeptides provided herein, including wildtype and variant polypeptides and modified forms thereof, can harbor an N- or C-terminal tag, such as a FLAG tag, and can be detected using an anti-tag reagent, such as an anti-FLAG antibody. The choice of anti-tag reagent is a function of the tag that is employed with the binding molecule or protein. In addition, an anti-tag reagent is chosen that is compatible with the environment conditions (e.g. pH) used in the assay. It is within the level of one of skill in the art to identify or select such reagents, and test their compatibility with the assay conditions. Anti-tag reagents are readily available such as from commercial sources or other sources. Exemplary anti-tag reagents that can be used for detection in the methods herein include, but are not limited to an anti-FLAG antibody or anti-Myc antibody (available from vendors such as Abcam, Cambridge, Mass.; GeneTex, Irvine, Calif.). In addition, depending on the protein of interest and strength of signal, other antibodies and/or chromogenic substrates can be used in a variant version of the ELISA. For example, for native proteins that do not harbor a tag, detection can be achieved using two antibodies, e.g., primary antibody recognizing the native target and a secondary antibody conjugated with enzymes used for detection.

[0767] Typically, in the methods herein, the method of detection of the bound complex is one that is capable of being quantitated. For example, a label can produce a signal, such as a colorimetric signal, a chemiluminescent signal, a chemifluorescent signal or a radioactive signal. Depending upon the nature of the label, various techniques can be employed for detecting or detecting and quantitating the label. For example, methods of quantitation include, but are not limited to, spectrophotometric, fluorescent and radioactive methods.

[0768] c. Dot Blot and Other Radiolabeled Heparin Binding Assays

[0769] The degree of heparin binding can also be detected using blot-based methods with radiolabeled heparin. For example, a dot blot method can be used to detect and quantitate picomole amounts of heparin-binding protein of interest. Proteins are spotted on nitrocellulose and then incubated with ¹²⁵I-heparin. Binding of heparin to the proteins is detected by radioautography and quantitated by scanning densitometry; proteins are quantitated by densitometric analysis of the amido black stained nitrocellulose (Hirose et al. (1986) Analytical Biochemistry 156(2):320-325). In another example, radiolabeled heparin, such as ³H-heparin is incubated in a 96-well microtiter format with the heparin binding protein of interest, such as any ADA2 provided herein, including wildtype, variants or modified forms thereof. The mixture is then transferred to a 96-well microtiter filter plates which filters out the unbound heparin and protein of interest. Binding is detected by scintillation counting (see Proudfoot et al. (2003). PNAS 100(4):1885-1890).

[0770] 3. Methods for Assessing Stability

[0771] Stability of any of the ADA2 provided herein in specific conditions can be determined by any method known to one of skill in the art used to assess protein stability. Stability in a specific condition (e.g., high temperature condition for thermal stability, high or low pH conditions for pH tolerance, plasma conditions for plasma stability, and long-term storage for long-term stability) can be assessed by determining changes in physical properties of the polypeptide, including but not limited to, structural configuration or conformation, enzymatic activity, protein unfolding, aggregation, and solubility, before and after without exposure to the specific condition. Stability also can be assessed by comparing any one or more of activity, aggregation or other physical properties in the presence of one or more denaturation conditions compared to a native, wildtype or reference ADA2 polypeptide.

[0772] Protein stability includes a measure of the maintenance of one or more physical properties of a protein in response to an environmental condition (e.g. an elevated temperature). In one example, the physical property is the maintenance of the covalent structure of the protein (e.g. the absence of proteolytic cleavage, unwanted oxidation or deamidation). In another example, the physical property is the presence of the protein in a properly folded state (e.g. the absence of soluble or insoluble aggregates or precipitates). In one example, stability of a protein is measured by assaying a biophysical property of the protein, for example thermal stability, pH unfolding profile, stable removal of glycosylation, solubility, biochemical function (e.g., enzymatic activity, ability to bind to a protein (e.g., a ligand, a receptor, an antigen, etc.) or chemical moiety, etc.), and/or combinations thereof. In another example, biochemical function is demonstrated by the binding affinity of an interaction. In addition, stability can be assessed by visual inspection, percent recovery, protein purity and apparent melting temperature. Stability measurements also provide important biological information; a decrease in stability can be a sign of protein unfolding, misfolding and aggregation, which can lead to polypeptides ineffective for treatment. Such assays can be performed under any conditions that can result in protein instability, and can be assessed on any physical or functional properties associated with an ADA2 protein. Stability can be measured using any methods known in the art and/or described herein.

[0773] a. Conditions

[0774] i. Stability in Plasma

[0775] For therapeutic uses, such as for treatment of tumors or cancers, it is desirable to administer to the subject a dosage of ADA2 that will maintain plasma adenosine deaminase (ADA) activity for a sufficient time for therapeutic effect. Hence, sufficient retention of stability in the plasma and tumor microenvironment (TME) is necessary for effectiveness of the treatment. The plasma stability of any ADA2 described herein, such as a wildtype, variant or conjugate, can be determined by measuring the changes in enzymatic activity and/or other physical properties, before and after incubation in plasma, e.g., ex vivo mammalian plasma.

[0776] Stability can be assessed in vitro or in vivo. For example, stability can be tested after exposure to plasma for a desired length of time, which can be empirically determined or selected by a skilled artisan depending on the desired length of time. For example, the incubation time can be at least 1 hour, such as at least 2, 3, 4, 5, 10, 15, 20, 24, 30, 36, 48, 60, 72 hours or more. The protein can be directly administered systemically, such as intravenously, and activity can be assessed. In other examples, the protein can be subject to appropriate incubation conditions in vitro. In one example, the stability of ADA activity of any ADA2 provided herein can be measured after incubation at 37° C., in 25% ex vivo plasma or serum, such as human or non-human plasma or serum, for example, mouse plasma. For example, as shown herein, ADA2 is more stable than ADA1 after a long incubation (e.g., 24 hours) in plasma. Other conditions, such as temperature, type of plasma and buffer conditions, can also be selected based on the desired conditions to be tested.

[0777] ii. Thermal Stability

[0778] Proteins differ in their degrees of thermal stability (or thermostability). In particular, proteins with biological activities, such as enzymes, can have different optimal temperatures. Thermostability, the quality of a protein to resist irreversible change in its chemical or physical structure at a relatively high temperature, can be indicative of overall stability of a protein. Increased temperature usually induces protein unfolding, and disruption of secondary, tertiary and quaternary structure of proteins, leading to destabilization of protein. Thermostability of a protein, such as any ADA2 polypeptide provided herein, can be determined by measuring the changes in enzymatic activity and/or other physical properties, before and after incubation in relatively high or low temperatures.

[0779] The stability of a protein can be determined by measuring the activity of the protein as a function of time. The melting temperature (Tₘ) of the protein can be used as a marker of solution stability and in vivo stability for proteins. The unfolding temperature of a particular protein refers to that temperature at which the protein loses its secondary structure and typically, its activity and can be determined using methods known to those of skill in the art and described herein, such as differential scanning calorimetry (DSM). In another example, other methods to determine the physical property of the protein, such as dynamic light scattering (DLS), can be used to characterize the stability of proteins as a function of temperature. In other examples, the thermal stability can be measured biochemically. An exemplary biochemical method for assessing thermal stability is a thermal challenge assay. In a “thermal challenge assay,” a polypeptide is subjected to a range of elevated temperatures for a set period of time. For example, in one embodiment, test polypeptides are subject to a range of increasing temperatures, e.g., for 10 minutes. The activity of the protein is then assayed by a relevant biochemical assay (e.g., adenosine deaminase assay). The thermal challenge assay can be used to determine the temperature at which 50% adenosine deaminase (ADA) activity is retained (i.e., the T_{C} value or T₅₀). The T_{C} or T₅₀ values are not necessarily equivalent to the biophysically derived Tm values. Such an assay can be performed to assess the thermal stability of any of the ADA2 provided herein, including wildtype, variants, conjugates and other modified forms thereof

[0780] iii. Stability in pH or pH Optima

[0781] Proteins also differ in their ability to tolerate changes in pH, or can have different optimal pH for biological activity. Variations in pH in the environment can result in changes in the charge on the basic and acidic groups of amino acid side chains in a protein causing changes in electrostatic interactions that can destabilize the native structure. Relatively small changes in pH can result in fairly dramatic decreases in protein conformational stability, and the changes in conformational stability can also lead to aggregation of the proteins. The ionic strength in solution and the isoelectric point (pI) of the solution also contribute to the stability of the protein in solution in different pH conditions.

[0782] For example, the pH environment of the tumor, and the pH optima of a particular protein, can affect the therapeutic efficacy of an ADA2 protein. For example, the tumor microenvironment (TME) has regions, which generally are in hypoxic areas, with relatively acidic pH, such as pH 6.5-6.9 or lower. On the other hand, in regions with proliferating tissue, such as near blood vessels, the TME pH is more neutral. Thus, the pH optima of an ADA2 protein can be an important factor in determination of dosage and formulation of proteins used in methods of treating tumors as described herein.

[0783] The stability of a protein, such as any ADA2 polypeptide provided herein, in a specific pH environment, can be determined by measuring the changes in enzymatic activity and/or other physical properties, before and after incubation in relatively high or low pH. For example, the enzymatic activity of any of the ADA2 provided herein can be measured using an ADA activity assay described herein, at various pH conditions (e.g. at pH ranging from or from about 6.0 to 8.0, such as from or from about 6.5 to 7.5, inclusive, for example 6.5±0.2 or 7.4±0.2). In another example, other methods to determine the physical property of the protein, such as, dynamic light scattering (DLS), can be used to characterize the stability of proteins as a function of solution pH.

[0784] iv. Other Conditions

[0785] Other conditions in the environment or the formulation, such as ionic strength, buffer compositions, presence of other substances such as other proteins in the tumor microenvironment, presence of pharmaceutical excipients, or presence of other agents used for combination therapy, can contribute to the stability of the polypeptide used in the method of treatment, such as any of the ADA2 polypeptides provided herein. Stability of the polypeptide in conditions that can affect protein stability and function can be tested using methods described below, but after incubation in the specific condition to be tested. The assays can be used make minor adjustments to the formulations provided herein while retaining the stability of ADA2 and/or other agents used in combination therapy.

[0786] b. Determination of Physical Properties

[0787] Stability of a polypeptide, such as any ADA2 polypeptide provided herein, can be determined by measuring changes in physical or functional properties or activities of the polypeptide, such as enzymatic activity, structural configuration or conformation, enzymatic activity, protein unfolding, aggregation, and solubility, using any methods known in the art. The functional or physical property that is assessed can be compared in the presence and absence of the condition (e.g. plasma, temperature, pH or other condition). It is understood that the assay to compare or assess the stability of the protein in the presence of a condition compared to its absence is substantially the same, except for the presence of or the extent of the condition present.

[0788] Proteins are stabilized by physical forces such as hydrogen bonds, hydrophobic interactions, electrostatic interactions, disulfide bonds, and van der Waals force. Disruption of any of these forces can destabilize the protein, and the disruption of these forces can be measured using a variety of methods known in the art. Also, in certain conditions, such as specific pH or temperature, or high protein concentration during overexpression, the polypeptide can form protein aggregates. Protein aggregates are the irreversibly assembled protein molecules to form higher-order oligomers with native or non-native protein structures that can be soluble or insoluble in nature. Aggregation often results in conformational destabilization of the protein.

[0789] Methods to determine changes in physical properties include spectroscopy, thermodynamic methods, hydrodynamic methods, chromatography, electrophoresis, analysis of biological activity, and analysis of protein-protein interaction (see, e.g., Uversky, V. and E. Permiakov, eds., Methods in Protein Structure and Stability Analysis, Nova Science Publishers, New York (2007); Chaudhury et al. (2014) The AAPS Journal 16(1):48-64). An increase in particle size and/or a decrease in the melting temperature also can indicate denaturation and subsequent aggregation of the ADA2 polypeptide. In addition, protein stability can be assessed by visual inspection of protein integrity by electrophoretic methods, calculating percent recovery, protein purity and apparent melting temperature. Exemplary assays to assess protein stability are described below.

[0790] i. Enzymatic Activity

[0791] Disruption of stability can cause changes in tertiary structure of the active site of an enzyme, leading to a disruption of enzymatic activity. Biological activity is often closely correlated with changes in other physical properties of the protein, such as circular dichroism spectra. Functional assays, such as enzymatic activity assays, including any of the adenosine deaminase (ADA) activity assays described above, can be used as a measure of protein stability in the presence and absence of an assessed condition. For example, the stability of adenosine deaminase (ADA) can be measured before and after exposure to specific conditions, e.g., conditions described above in Section F.2.a, to assess the stability of any ADA2 provided herein. Exposure to a specific condition, such as incubation in plasma, can be performed at a fixed time point, or assessed over several time points.

[0792] ii. Chromatographic Analysis of Protein Purity

[0793] Methods to assess the purity of the native protein can be used as a measure to determine the state of degradation or other destabilizing events for a protein. Protein purity can be measured using chromatographic methods, for example, by reversed phase high performance liquid chromatography (RP-HPLC). Protein purity, as determined by RP-HPLC, is the percent of the main ADA2 protein peak present, as compared to all of the protein species present. Thus, RP-HPLC, and similar methods known to one of skill in the art, can assess degradation of the enzyme. Protein purity can be assessed over time. Protein purity can be assessed in the presence of one or more conditions, such as conditions described above in Section F.2.a, and in varying amounts thereof. Percent recovery also can be determined as the relative percentage of the polypeptide in the presence of various conditions for different lengths of time as compared to a reference sample. The stability of any ADA2 polypeptides provided herein, including wildtype, variants, conjugates or other modified forms thereof, also can be determined by measuring the oxidation of the polypeptide by RP-HPLC. Percent oxidation is a measure of sum of the peak areas of the major (ox-1) and minor (ox-2) peaks.

[0794] In another example, other chromatographic methods such as size exclusion chromatography (SEC) can be used to determine the folding of a protein or the state of multimerization. SEC can be performed under native solution conditions, preserving macromolecular interactions. Size exclusion chromatography measures the hydrodynamic volume (not molecular weight), allowing folded and unfolded versions of the same protein to be distinguished. Quantitative assessment of aggregate levels in protein formulations by SEC is typically accomplished by UV detection, sometimes at multiple wavelengths, and often in combination with molecular weight characterization by multi-angle light scattering detection. SEC can also be employed to study reversible protein self-association (Chaudhury et al. (2014) The AAPS Journal 16(1):48-64).

[0795] iii. Differential Scanning Calorimetry

[0796] The thermostability of a polypeptide in solution, such as any ADA2 provided herein, including wildtype, variants and modified forms thereof can be determined using differential scanning calorimetry (DSC). In DSC, a sample cell (containing protein and buffer) and a reference cell (buffer only) are heated together to raise the temperature at a constant rate, and the excess heat required in the sample cell for maintaining equal temperature in both cells (due to transition from a folded, native state of protein to unfolded forms as temperature is increased) is recorded. The midpoint temperature of the thermal transition (or thermal melting temperature, Tₘ) is commonly used as an indicator of thermostability. DSC can also provide detailed information on the thermodynamic parameters of protein unfolding, including the change in enthalpy (ΔH), entropy (ΔS), Gibb's free energy (ΔG), and heat capacity (ΔCp), if the experimental conditions allow reversible thermal transitions. DSC can be used to determine the effect of solution conditions (pH, ionic strength) and excipients on protein stability during protein formulation (Chaudhury et al. (2014) The AAPS Journal 16(1):48-64).

[0797] iv. Differential Scanning Fluorimetry

[0798] Differential scanning fluorimetry (DSF), also referred to as fluorescence thermal shift assay, is a method used to monitor thermal transitions of proteins, such as unfolding, in the presence of a fluorescent dye. The polarity-sensitive fluorescent dyes used for DSF are highly fluorescent in non-polar environment (e.g., in hydrophobic pockets of (partially) unfolded proteins), whereas the fluorescence is quenched in aqueous solution and/or in presence of native protein. DSF can be used to determine conformational stability of proteins. When the fluorescence intensity of the dye in presence of protein is plotted as a function of the temperature, the midpoints of transition temperatures (Tₕ) of the protein can be derived from the inflection point of the resulting sigmoidal graph. The Tₕ values for various proteins in different solutions, as obtained from DSF experiments, are well correlated with thermal melting temperature (Tₘ) values determined by differential scanning calorimetry. In addition, information about the cooperative (two-state) or complex unfolding transitions in multi-domain proteins can be obtained by DSF (Chaudhury et al. (2014) The AAPS Journal 16(1):48-64).

[0799] The dye can be a small molecule, a peptide or a nucleic acid, and can be performed using a conventional real-time PCR instrument. Commonly used fluorescent dyes include SYRPO Orange, ANS, ROX™ and Nile red. For example, the melting temperature of any ADA2 provided herein, including wildtype, variants, conjugates or other modified forms, can be assessed using the ROX™ protein thermal shift dye (Applied Biosystems, Carlsbad, Calif.; Cat. No. 4461146) as the fluorescent dye, and the ViiA7 RT-PCR System (Applied Biosystems, Carlsbad, Calif.) to measure the shift in fluorescence as the temperature of the samples were increased.

[0800] v. Intrinsic Fluorescence Spectroscopy

[0801] The stability of a polypeptide, such as any ADA2 provided herein, including wildtype, variants, conjugates and other modified forms thereof can be determined by measuring changes in its intrinsic fluorescence. Intrinsic fluorescence spectroscopy detects the fluorescence from the internal fluorophores of proteins, such as the aromatic amino acid residues tryptophan and tyrosine. Properties of the fluorescence of tryptophan including its intensity and wavelength of maximum emission are especially sensitive to their local environment. As a result, the emission can often be used as probe to study changes in the higher-order structure of proteins. Protein unfolding is often accompanied by a decrease in fluorescence intensity and shift of maximum emission of Trp residues to longer wavelengths (red shift). Fluorometers equipped with plate reader and temperature control capability can be employed to assess the conformational stability of protein therapeutics. (Chaudhury et al. (2014) The AAPS Journal 16(1):48-64).

[0802] vi. Circular Dichroism

[0803] Circular dichroism (CD) spectroscopy measures the differential absorption of left and right circularly polarized light, and is a popular tool for characterizing a protein's secondary structure content (i.e., α-helix and β-sheet) as a function of temperature and solution conditions. Far-UV CD spectra (160-250 nm) are used for this purpose, while near-UV CD spectra (230-320 nm) can provide information about the local environment of aromatic amino acid side chains and disulfides, which can then be used to monitor changes in tertiary structure. CD is incompatible with certain buffers and additives possessing high UV absorption (Chaudhury et al. (2014) The AAPS Journal 16(1):48-64).

[0804] vii. Dynamic Light Scattering

[0805] Dynamic light scattering (DLS), also known as photon correlation spectroscopy or quasi-elastic light scattering, is used to monitor changes in protein hydrodynamic properties in solution (e.g., aggregation) as well as making absolute size measurements. DLS measures the time-dependent fluctuation in the intensity of scattered light from a solution, and through autocorrelation analysis can provide information including diffusion coefficients, hydrodynamic radii, and size distribution of particles with sizes of a few nanometers up to about 1 m. A DLS signal is very sensitive to the presence of the largest sized particle in solution. DLS is useful for detection of higher-order protein oligomers and aggregates. DLS has been employed to characterize the colloidal stability of protein therapeutics, such as monoclonal antibodies as a function of solution pH and temperature. DLS has also been applied to assess the aggregation propensity of proteins in response to the physical stresses present during the production, delivery and administration of many proteins (Chaudhury et al. (2014) The AAPS Journal 16(1):48-64). Formation of ADA2 aggregates after exposure to specific conditions can be determined by measuring the hydrodynamic radius of particles by dynamic light scattering under various conditions (e.g., denaturation conditions or other storage conditions).

[0806] viii. Static Light Scattering

[0807] Static light scattering (SLS) is a technique that measures the time-averaged intensity of scattered light, providing information about the size of particles suspended in solution. Multi-angle light scattering (MALS), a technique that collects and analyzes static light scattering intensity from multiple angles, can be used to determine the absolute molecular weight and radius of gyration of proteins and larger molecular weight oligomers. MALS detection can be coupled to size exclusion chromatography (SEC) or flow field fractionation (FFF) to separate and then characterize protein aggregates. Light scattering can also be measured with the fluorescence detection by simply scanning through the entire spectral region containing both the fluorescence and light scattering. This permits both conformational stability and aggregation data to be obtained (Chaudhury et al. (2014) The AAPS Journal 16(1):48-64).

[0808] ix. Turbidity Measurements

[0809] The magnitude of the turbidity (or optical density) of a solution is proportional to both the size and quantity of protein aggregates in solution (Optical density=Absorbance+Light scattering). Turbidity is usually measured in the wavelength range of 320-400 nm because proteins typically do not have significant absorbance in this wavelength range, and the magnitude of the light scattering signal is greater as the wavelength is lowered. During stability testing, the aggregation propensity of proteins in various formulations can be evaluated by either a temperature ramp method (measuring turbidity changes as a function of increasing temperature) or a kinetic method (measuring turbidity changes as a function of time at a constant temperature (Chaudhury et al. (2014) The AAPS Journal 16(1):48-64).

[0810] x. Other Methods to Determine Stability

[0811] Other methods known to one of skill in the art that can be used to determine the stability of any ADA2 provided herein, including wildtype, variants and modified forms thereof in the method of treatment provided herein, include polyacrylamide gel electrophoresis (PAGE) and visual analysis of protein integrity, immunoblotting, nuclear magnetic resonance (NMR) spectroscopy, isothermal titration calorimetry, transverse urea gradient electrophoresis (TUG-PAGE), neutron scattering, analytical ultracentrifugation, tritium planigraphy and viscometric analysis. Visual analysis of protein integrity can include, for example, observation of lower molecular weight degradation products or higher molecular weight aggregation products in PAGE gels.

[0812] 4. Assay for Therapeutic Activity

[0813] The therapeutic activity, such as an anticancer activity, of any of the ADA2 used in the method of treatment provided herein, can be measured using in vitro and in vivo functional assays. Provided herein are exemplary assays and systems used to monitor the therapeutic effect of treatment with any ADA2 provided herein.

[0814] a. In vitro Tests

[0815] Anticancer activity of any ADA2 provided herein, including wildtype and variants, conjugates and other modified forms thereof, and combination therapy using any ADA2 provided herein and other agents, can be examined in vitro, for example, by incubating a cancer cell culture with the derivative, and then evaluating cell growth inhibition in the culture. Suitable cells for such testing include, but are not limited to, murine P388 leukemia, B16 melanoma and Lewis lung cancer cells, as well as MCF7 human breast cancer cells, OVCAR-3 cancer cells, A549 lung cancer cells, MX-1 human breast tumor cells, HT29 colon cancer cell line, HepG2 liver cancer cells, HCT116 colon cancer cells, Caco-2 human colonic cancer cells, U138MG human glioma cell line, DU 145 human prostate cancer cells, L1210 lymphatic leukemia cells, L4946 lymphatic leukemia cells, 6C3HED lymphosarcoma cells, TA3 mammary adenocarcinoma cells, E2 Ehrlich carcinoma cells, 755 adenocarcinoma cells, 180 sarcoma cells, and B16 melanoma cells.

[0816] Reversal of adenosine-mediated immunosuppression by any ADA2 provided herein, including wildtype and variants, conjugates and other modified forms thereof, and combination therapy using any ADA2 provided herein and other agents, can be examined in vitro, for example, by performing proliferation assays. Such assays include, but are not limited to T-cell proliferation assays or a mixture of NK and T (NK/T) cell proliferation assays, in the presence of adenosine and/or any ADA2 provided herein and/or any other combination therapy agents. For example, the immunosuppressive effect of adenosine on various immune cells, such as lymphocytes, natural killer (NK) cells, polymorphonuclear granulocytes, and phagocytic cells such as tissue macrophages, can be assessed by proliferation assays using the immune cells or mixtures thereof, such as the mixture of NK and T (NK/T) cells prepared from peripheral blood mononuclear cells (PBMC). The effect of any ADA2 provided herein and any other combination therapy agents provided herein, can be assessed by comparing the results of such proliferation assays in the presence of adenosine, with or without the addition of any ADA2 provided herein and/or any other combination therapy agents provided herein, including immune checkpoint inhibitors. Combination therapy agents are described in Section H.4 below.

[0817] Proliferation assays can be used to measure the activity of any ADA2 provided herein, including wildtype and variants, conjugates and other modified forms thereof, and combination therapy using any ADA2 provided herein and other agents, in the presence of adenosine. The assays can measure proliferation of immune cells whose activity is suppressed by the addition of adenosine. Cells can be incubated for a sufficient time for cells to exhibit proliferation (such as, for example, 12 hours, or 1, 2, 3, 4, 5, 6, 7 days, 2, 3, 4, 5 weeks or longer). Cell proliferation can be measured by any method known in the art, including ³H-thymidine incorporation assay, 5-bromo-2-deoxyuridine (BrdU), ELISA, tetrazolium microplate assay and acid phosphatase assay (e.g., Maghni et al. (1999) J. Immunol. Method. 223(2):185-194). Cell proliferation also can be measured using kits available from Invitrogen (Cyquant NF cell proliferation assay kit), Cambrex (ViaLight HS (high sensitivity) BioAssay), Promega (CellTiter-Glo Luminescent Cell Viability Assay), Guava Technologies (CellGrowth assay), Stratagene (Quantos cell proliferation assay) (e.g., Assays for Cell Proliferation Studies, Genetic Eng. Biotechnol. News. 26(6)). In some examples, the cell proliferation can be normalized to proliferation of cells in the presence of adenosine. In some examples, the cell proliferation can be normalized to proliferation of cells in the absence of adenosine. In exemplary proliferation assays, cells can be added to a well of a 96-well plate in normal growth medium that includes adenosine and any ADA2 provided herein or any other combination therapy agents to be assayed.

[0818] b. In vivo Animal Models

[0819] Animal models can be used to assess the effects of therapeutic activity, such as tumor growth inhibition activity, provided herein, using any ADA2 provided herein. For example, animal models can be used to assess tumor size, volume or growth. In addition, animal models can be used to assess the pharmacokinetics or tolerability of the compositions or combinations.

[0820] Animal models can include, but are not limited to, mice, rats, rabbits, dogs, guinea pigs and non-human primate models, such as cynomolgus monkeys or rhesus macaques. Animal models including genetic models as well as xenograft models. For example, xenograft models include those in which, prior to testing the agents, tumors can be established in suitable test animals, such as immunodeficient or immunocompetent animals. In some examples, immunodeficient mice, such as nude mice or SCID mice, are transplanted with a tumor cell line, such as from an adenosine-associated cancer, to establish an animal model of that cancer. In other cases, syngeneic models employing immunocompetent animals are used.

[0821] Exemplary cell lines, including cancers associated with adenosine signaling, include, but are not limited to, CT26 murine colon cancer cells, MCF7 human breast cancer cells, HepG2 liver cancer cells, Caco-2 human colonic cancer cells, U138MG human glioma cell line, DU 145 human prostate cancer cells, L1210 lymphatic leukemia cells, L4946 lymphatic leukemia cells, 6C3HED lymphosarcoma cells, TA3 mammary adenocarcinoma cells, E2 Ehrlich carcinoma cells, 755 adenocarcinoma cells, 180 sarcoma cells, and B16 melanoma cells. Other cancer cells that can be used in animal xenograft models include PC3 prostate carcinoma cells, BxPC-3 pancreatic adenocarcinoma cells, MDA-MB-231 breast carcinoma cells, BT474 breast tumor cells, Tramp C2 prostate tumor cells, Mat-LyLu prostate cancer cells, MH194 mouse pancreatic carcinoma cells and KLN205 murine lung cancer cells.

[0822] Exemplary of an animal tumor model that can be used to assess the effect of cancer treatment using ADA2 provided herein is the CT26 syngeneic tumor model. This model is created by subcutaneous injection of CT26 murine primary colon carcinoma (ATCC CRL-2638) cells into syngeneic BALB/c mice. The mice are staged until the tumor is established, then the agent used for treatment, such as any ADA2 provided herein or combination therapy including ADA2 treatment, are administered. Another example of an animal tumor model of pancreatic cancer involves the generation of tumors in animals using BxPC-3 pancreatic adenocarcinoma cells (see e.g. Von Hoff et al. (2011) J. Clin. Oncol., 29:4548-54). Other examples of animal tumor models include the murine MH194+PSC4 syngeneic tumor model and the murine lung cancer KLN205 syngeneic tumor model.

[0823] Other animal models, such as mouse models developed to study cancer immunotherapies or combination therapies, can be used to assess the therapeutic effect of treatment using ADA2. For example, mouse models developed to study both the efficacy of cancer immunotherapy and the immune-related adverse events (irAEs), can be used. Some cancer immunotherapies that target immunomodulatory receptors, such as anti-CTLA4 and anti-PD-1 combination therapy, can also elicit irAEs, such as rash, diarrhea, colitis and liver damage. Therefore, using mouse models that can mimic the kinetics of response that are observed in the clinic and models that can reflect possible irAEs can be used to assess both the efficacy and possible adverse events associated with treatment. Such models include those that are carcinogen-induced, such as methylcholanthrene (MCA)-induced fibrosarcomas and 7,12-dimethylbenz[α]anthracene (DMBA)/12-O-tetradecanoylphorbol-13-acetate (TPA)-induced skin papillomas or genetically engineered mouse tumour models, which have enforced expression of oncogenes and/or the loss of function of tumour suppressors, often in a tissue-specific and/or temporally controlled manner. Examples include the Her2/neu or PyMT transgenic mice to mimic breast cancer, the MT/ret model of spontaneous metastatic melanoma and BrafCATyr-creERT2Ptenfl/fl mice in which 4-hydroxytamoxifen (4-HT) induces de novo melanoma as well as the use of adenoviral vectors encoding Cre recombinase to selectively introduce mutations in the oncogene Kras and the tumour-suppressor gene Tp53 in the pulmonary epithelia to induce autochthonous lung tumours. Carcinogen-induced mouse models of cancer better mimic cancers that are immunogenic. Alternatively, in tumor explant models, tumors can be transplanted orthotopically, i.e. at the normal place of occurrence, rather than subcutaneously, to more accurately reflect the tumor microenvironment. Another exemplary mouse model to assess the efficacy and irAE of combination cancer immunotherapy is the Foxp3-DTR mice, which can be conditionally depleted of their Tregs to mimic the maximum suppression on all immune cells. This model allows the assessment of the efficacy of modulating co-inhibitory/co-stimulatory receptors or with other therapies to attenuate anti-tumour immunity/irAEs (Liu et al. (2014) Clinical & Translational Immunology 3:e22).

[0824] Genetic models also can be used in which animals are rendered to be deficient in one or more genes that results in tumor generation or formation. Such genetically engineered mouse models (GEMM) can recapitulate the molecular and clinical features of disease. For example, an exemplary pancreatic cancer genetic model involves the pancreatic specific expression of endogenous mutants Kras and Trp53 alleles, which results in mutant mice that exhibit a deficient phenotype (termed KPC mice; LSL-Kras^{G12D}, LSL-Trp53^{R172H}, Pdx-1-Cre). The KPC mice develop primary pancreatic tumors that exhibit features similar to human disease, including resistance to the nucleoside analog gemcitabine (see e.g. Frese et al. (2012) Cancer Discovery, 2:260-269).

[0825] i. Tumor Metabolic Activity

[0826] A reduction in tumor metabolic activity can be tested for ADA2 treatment provided herein. Tumor metabolic activity can be assessed using standard procedures known in the art. For example, [¹⁸F]-fluorodeoxyglucose positron emission tomography (FDG-PET) can be used. PET is a non-invasive diagnostic that provides images and quantitative parameters of perfusion, cell viability, proliferation and/or metabolic activity of tissues. The images result from the use of different biological substances (e.g., sugars, amino acids, metabolic precursors, hormones) labelled with positron emitting radioisotopes. For example, FDG is an analogue of glucose and is taken up by living cells via the first stages of normal glucose pathway. In cancers, increased glycolytic activity exists resulting in trapping of FDG in the cancer cell. A decrease in FDG trapping correlates with a decreased tumor metabolic activity and anticancer activity. Guidelines for PET imaging are known to one of skill in the art and should be followed by any treating physician or technician.

[0827] ii. Tumor Size and Volume

[0828] For example, the tumor and/or metastasis size and location can be monitored. Tumor and or metastasis size can be monitored by any of a variety of methods known in the art, including external assessment methods or tomographic or magnetic imaging methods, such as the detection methods described herein. Monitoring size over several time points can provide information regarding the efficacy of the therapeutic methods provided herein. In addition, monitoring the increase or decrease in size of a tumor or metastasis, and can also provide information regarding the presence (i.e., detection and/or diagnosis) of additional tumors and/or metastases in the subject. Monitoring tumor size over several time points can provide information regarding the development of a neoplastic disease in a subject, including the efficacy of treatments of a neoplastic disease in a subject, such as the treatment provided herein.

[0829] In particular examples, reductions in tumor size and/or volume indicate that therapy is working. Tumor size and volume can be monitored based on techniques known to one of skill in the art. For example, tumor size and volume can be monitored by radiography, ultrasound imaging, necropsy, by use of calipers, by microCT or by ¹⁸F-FDG-PET. Tumor size also can be assessed visually. In particular examples, tumor size (diameter) is measured directly using calipers.

[0830] In other examples, tumor volume can be measured using an average of measurements of tumor diameter (D) obtained by caliper or ultrasound assessments. For example, tumor volume can be determined using VisualSonics Vevo 770 high-resolution ultrasound or other similar ultrasound. The volume can be determined from the formula V=D³×π/6 (for diameter measured using calipers) or V=D²×d×π/6 (for diameter measured using ultrasound where d is the depth or thickness). For example, caliper measurements can be made of the tumor length (1) and width (w) and tumor volume calculated as length×width²×0.52. In another example, microCT scans can be used to measure tumor volume (see e.g., Huang et al. (2009) PNAS, 106:3426-3430). As an example, mice can be injected with Optiray Pharmacy ioversol injection 74% contrast medium (e.g., 741 mg of ioversol/mL), mice anesthetized, and CT scanning done using a MicroCat 1A scanner or other similar scanner (e.g., IMTek) (40 kV, 600 μA, 196 rotation steps, total angle or rotation=196). The images can be reconstructed using software (e.g., RVA3 software program; ImTek). Tumor volumes can be determined by using available software (e.g., Amira 3.1 software; Mercury Computer Systems). Tumor volume or size also can be determined based on size or weight of a tumor.

[0831] The percent of tumor growth inhibition can be calculated based on the volume using the equation:% TGI=[1−(Tₙ−T₀)÷(Cₙ−C₀)]×100%, where “Tₙ” is the average tumor volume for the treatment group at day “n” after the final dose of ADA2; “T₀” is the average tumor volume in that treatment group at day 0, before treatment; “Cₙ” is the average tumor volume for the corresponding control group at day “n”; and “C₀” is the average tumor volume in the control group at day 0, before treatment. Statistical analysis of tumor volumes can be determined.

[0832] c. Clinical Monitoring

[0833] The methods provided herein can further include one or more steps of monitoring treatment effect, such as tumor treatment using any of the ADA2 provided herein. Subjects can be monitored by monitoring the tumor, the general health of the subject and/or course of disease in the subject. Any of a variety of monitoring steps can be included in the methods provided herein, including, but not limited to, monitoring tumor size, monitoring anti-(tumor antigen) antibody titer, monitoring the presence and/or size of metastases, monitoring the subject's lymph nodes, and monitoring the subject's weight or other health indicators including blood or urine markers. The purpose of the monitoring can be for assessing the health state of the subject or the progress of therapeutic treatment of the subject, or can be for determining whether or not further administration of ADA2 is warranted, or for determining when or whether or not to administer a further agent or treatment, or can be for determining whether or not to administer or continue combination therapy.

[0834] Parameters indicative of the health of a subject also can be monitored. Monitoring the health of a subject can be used to determine the efficacy of the therapeutic method, as is known in the art. Any of a variety of health diagnostic methods for monitoring disease such as neoplastic disease or other disease can be monitored, as is known in the art. For example, the weight, blood pressure, pulse, breathing, color, temperature or other observable state of a subject can indicate the health of a subject. In addition, the presence or absence or level of one or more components in a sample from a subject can indicate the health of a subject. Typical samples can include blood and urine samples, where the presence or absence or level of one or more components can be determined by performing, for example, a blood panel or a urine panel diagnostic test. Exemplary components indicative of a subject's health include, but are not limited to, white blood cell count, hematocrit, or reactive protein concentration.

[0835] 5. Pharmacodynamics/Pharmacokinetics and Tolerability

[0836] The effect of administration of any ADA2 provided herein, including wildtype, variants and modified forms thereof, alone or in combination with another therapeutic agent, on the pharmacokinetic and pharmacodynamic properties of any administered agent also can be assessed in vivo using animal models and/or human subjects, such as in the setting of a clinical trial. Pharmacokinetic or pharmacodynamic studies can be performed using animal models or can be performed during studies with patients administered with any ADA2 provided herein, including wildtype, variants and modified forms thereof.

[0837] Animal models include, but are not limited to, mice, rats, rabbits, dogs, guinea pigs and non-human primate models, such as cynomolgus monkeys or rhesus macaques. In some instances, pharmacokinetic or pharmacodynamic studies are performed using healthy animals. In other examples, the studies are performed using animal models of a disease for which therapy with ADA2 is considered, such as animal models of any adenosine-associated disease or disorder, for example a tumor model.

[0838] The pharmacokinetic properties of any ADA2 provided herein, including wildtype, variants and modified forms thereof, can be assessed by measuring such parameters as the maximum (peak) concentration (Cₘₐₓ), the peak time (i.e., when maximum concentration occurs; Tₘₐₓ), the minimum concentration (i.e., the minimum concentration between doses; Cₘᵢₙ), the elimination half-life (T_{1/2}) and area under the curve (i.e., the area under the curve generated by plotting time versus concentration; AUC), following administration. The absolute bioavailability of the ADA2 can be determined by comparing the area under the curve of ADA2 following subcutaneous delivery (AUCsc) with the AUC of ADA2 following intravenous delivery (AUCᵢᵥ). Absolute bioavailability (F), can be calculated using the formula: F=([AUC]_{sc}×doses_{sc})/([AUC]ᵢᵥ×doseᵢᵥ). A range of doses and different dosing frequency of dosing can be administered in the pharmacokinetic studies to assess the effect of increasing or decreasing concentrations of the enzyme, such as any ADA2 provided herein, including wildtype, variants and modified forms thereof, in the dose.

[0839] Studies to assess the safety and tolerability of a treatment also are known in the art and can be used herein. Following administration of any of the ADA2 provided herein, or any combination therapy provided herein, the development of any adverse reactions can be monitored. Adverse reactions can include, but are not limited to, injection site reactions, such as edema or swelling, headache, fever, fatigue, chills, flushing, dizziness, urticaria, wheezing or chest tightness, nausea, vomiting, rigors, back pain, chest pain, muscle cramps, seizures or convulsions, changes in blood pressure and anaphylactic or severe hypersensitivity responses. Typically, a range of doses and different dosing frequencies can be administered in the safety and tolerability studies to assess the effect of increasing or decreasing concentrations of any ADA2 or agents used in combination therapy in the dose.

### G. PHARMACEUTICAL COMPOSITIONS AND FORMULATIONS

[0840] Provided herein are pharmaceutical compositions containing an adenosine deaminase 2 (ADA2), such as a wildtype ADA2, variants, conjugates or other modified forms thereof, and a pharmaceutically acceptable excipient or additive. The pharmaceutical compositions can be use in treatment of diseases or conditions associated with elevated adenosine levels (e.g., hyperproliferative disease or condition, such as a tumor or cancer). Any of the ADA2 can be administered in a single agent therapy, or can be administered in a combination therapy with a further agent or treatment as described herein. The compositions can be formulated for single dosage administration or for multiple dosage administration. The agents can be formulated for direct administration. The compositions can be provided as a liquid or lyophilized formulation.

[0841] Pharmaceutically acceptable compositions are prepared in view of approvals for a regulatory agency or other agency prepared in accordance with generally recognized pharmacopeia for use in animals and in humans. The compositions can be prepared as solutions, suspensions, powders, or sustained release formulations. Typically, the compounds are formulated into pharmaceutical compositions using techniques and procedures well known in the art (see e.g., Ansel Introduction to Pharmaceutical Dosage Forms, Fourth Edition, 1985, 126). The formulation should suit the mode of administration.

[0842] Compositions can be formulated for administration by any route known to those of skill in the art including intramuscular, intravenous, intradermal, intralesional, intraperitoneal injection, subcutaneous, intratumoral, epidural, nasal, oral, vaginal, rectal, topical, local, otic, inhalational, buccal (e.g., sublingual), and transdermal administration or any route. Other modes of administration also are contemplated. Administration can be local, topical or systemic depending upon the locus of treatment. Local administration to an area in need of treatment can be achieved by, for example, but not limited to, local infusion during surgery, topical application, e.g., in conjunction with a wound dressing after surgery, by injection, by means of a catheter, by means of a suppository, or by means of an implant. Compositions also can be administered with other biologically active agents, either sequentially, intermittently or in the same composition. Administration also can include controlled release systems including controlled release formulations and device controlled release, such as by means of a pump.

[0843] The most suitable route in any given case depends on a variety of factors, such as the nature of the disease, the progress of the disease, the severity of the disease and the particular composition which is used. Pharmaceutical compositions can be formulated in dosage forms appropriate for each route of administration. In particular, the compositions can be formulated into any suitable pharmaceutical preparations for systemic, intraperitoneal, oral or direct administration. For example, the compositions can be formulated for administration subcutaneously, intramuscularly, intratumorally, intravenously or intradermally. In some embodiments, the compositions contain nucleic acids that encode the variant ADA2 polypeptide provided herein, such as oncolytic viral vectors or gene therapy vectors, or cells, such as modified immune cells for adoptive immunotherapy, and particular compositions can be formulated in dosage forms appropriate for the particular composition.

[0844] Administration methods can be employed to decrease the exposure of the active agent to degradative processes, such as proteolytic degradation and immunological intervention via antigenic and immunogenic responses. Examples of such methods include local administration at the site of treatment or continuous infusion (e.g., of ADA2 polypeptide or variant thereof).

[0845] The compounds can be formulated into suitable pharmaceutical preparations such as solutions, suspensions, tablets, dispersible tablets, pills, capsules, powders, sustained release formulations or elixirs, for oral administrations well as transdermal patch preparation and dry powder inhalers. Typically, the compounds are formulated into pharmaceutical compositions using techniques and procedures well known in the art (see e.g., Ansel Introduction to Pharmaceutical Dosage Forms, Fourth Edition, 1985, 126). Generally, the mode of formulation is a function of the route of administration. Generally, the compositions are formulated in lyophilized or liquid form. Where the compositions are provided in lyophilized form they can be reconstituted just prior to use by an appropriate buffer, for example, a sterile saline solution.

[0846] 1. Formulations—liquids, injectables, emulsions

[0847] The formulation generally is made to suit the route of administration. Parenteral administration, generally characterized by injection or infusion, either subcutaneously, intramuscularly, intravenously or intradermally is contemplated herein. Preparations for parenteral administration include sterile solutions ready for injection, sterile dry soluble products, such as lyophilized powders, ready to be combined with a solvent just prior to use, including hypodermic tablets, sterile suspensions ready for injection, sterile dry insoluble products ready to be combined with a vehicle just prior to use and sterile emulsions. Injectables can be prepared in conventional forms, either as liquid solutions or suspensions, solid forms suitable for solution or suspension in liquid prior to injection, or as emulsions. Lyophilized formulations are ideal for storage of large unit doses for later use or storage.

[0848] In one example, pharmaceutical preparation can be in liquid form, for example, solutions, syrups or suspensions. If provided in liquid form, the pharmaceutical preparations can be provided as a concentrated preparation to be diluted to a therapeutically effective concentration before use. The pharmaceutical preparations also can be provided in a dosage form that does not require dilution for use. Such liquid preparations can be prepared by conventional means with pharmaceutically acceptable additives such as suspending agents (e.g., sorbitol syrup, cellulose derivatives or hydrogenated edible fats); emulsifying agents (e.g., lecithin or acacia); non-aqueous vehicles (e.g., almond oil, oily esters, or fractionated vegetable oils); and preservatives (e.g., methyl or propyl-p-hydroxybenzoates or sorbic acid). In another example, pharmaceutical preparations can be presented in lyophilized form for reconstitution with water or other suitable vehicle before use.

[0849] Injectables are designed for local and systemic administration. Injectables can be prepared in conventional forms, either as liquid solutions or suspensions, solid forms suitable for solution or suspension in liquid prior to injection, or as emulsions. Suitable excipients are, for example, water, saline, dextrose, glycerol or ethanol. Preparations for parenteral administration include sterile solutions ready for injection, sterile dry soluble products, such as lyophilized powders, ready to be combined with a solvent just prior to use, including hypodermic tablets, sterile suspensions ready for injection, sterile dry insoluble products ready to be combined with a vehicle just prior to use and sterile emulsions. The solutions can be either aqueous or nonaqueous. If administered intravenously, suitable carriers include physiological saline or phosphate buffered saline (PBS), and solutions containing thickening and solubilizing agents, such as glucose, polyethylene glycol, and polypropylene glycol and mixtures thereof.

[0850] Pharmaceutical compositions can include carriers or other excipients. For example, pharmaceutical compositions provided herein can contain any one or more of a diluents(s), adjuvant(s), antiadherent(s), binder(s), coating(s), filler(s), flavor(s), color(s), lubricant(s), glidant(s), preservative(s), detergent(s), sorbent(s) or sweetener(s) and a combination thereof or vehicle with which a modified PH20 polypeptide is administered. For example, pharmaceutically acceptable carriers or excipients used in parenteral preparations include aqueous vehicles, nonaqueous vehicles, antimicrobial agents, isotonic agents, buffers, antioxidants, local anesthetics, suspending and dispersing agents, emulsifying agents, sequestering or chelating agents and other pharmaceutically acceptable substances. Formulations, including liquid preparations, can be prepared by conventional means with pharmaceutically acceptable additives or excipients.

[0851] Pharmaceutical compositions can include carriers such as a diluent, adjuvant, excipient, or vehicle with which the composition are administered. Examples of suitable pharmaceutical carriers are described in “Remington's Pharmaceutical Sciences” by E. W. Martin. Such compositions will contain a therapeutically effective amount of the compound or agent, generally in purified form or partially purified form, together with a suitable amount of carrier so as to provide the form for proper administration to the patient. Such pharmaceutical carriers can be sterile liquids, such as water and oils, including those of petroleum, animal, vegetable or synthetic origin, such as peanut oil, soybean oil, mineral oil, and sesame oil. Water is a typical carrier. Saline solutions and aqueous dextrose and glycerol solutions also can be employed as liquid carriers, particularly for injectable solutions. Compositions can contain along with an active ingredient: a diluent such as lactose, sucrose, dicalcium phosphate, or carboxymethylcellulose; a lubricant, such as magnesium stearate, calcium stearate and talc; and a binder such as starch, natural gums, such as gum acacia, gelatin, glucose, molasses, polyvinylpyrrolidone, celluloses and derivatives thereof, povidone, crospovidones and other such binders known to those of skill in the art. Suitable pharmaceutical excipients include starch, glucose, lactose, sucrose, gelatin, malt, rice, flour, chalk, silica gel, sodium stearate, glycerol monostearate, talc, sodium chloride, dried skim milk, glycerol, propylene, glycol, water, and ethanol. For example, suitable excipients are, for example, water, saline, dextrose, glycerol or ethanol. A composition, if desired, also can contain other minor amounts of non-toxic auxiliary substances such as wetting or emulsifying agents, pH buffering agents, stabilizers, solubility enhancers, and other such agents, such as for example, sodium acetate, sorbitan monolaurate, triethanolamine oleate and cyclodextrins.

[0852] Pharmaceutically acceptable carriers used in parenteral preparations include aqueous vehicles, nonaqueous vehicles, antimicrobial agents, isotonic agents, buffers, antioxidants, local anesthetics, suspending and dispersing agents, emulsifying agents, sequestering or chelating agents and other pharmaceutically acceptable substances. Examples of aqueous vehicles include Sodium Chloride Injection, Ringers Injection, Isotonic Dextrose Injection, Sterile Water Injection, Dextrose and Lactated Ringers Injection. Nonaqueous parenteral vehicles include fixed oils of vegetable origin, cottonseed oil, corn oil, sesame oil and peanut oil. Antimicrobial agents in bacteriostatic or fungistatic concentrations can be added to parenteral preparations packaged in multiple-dose containers, which include phenols or cresols, mercurials, benzyl alcohol, chlorobutanol, methyl and propyl p-hydroxybenzoic acid esters, thimerosal, benzalkonium chloride and benzethonium chloride. Isotonic agents include sodium chloride and dextrose. Buffers include phosphate and citrate. Antioxidants include sodium bisulfate. Local anesthetics include procaine hydrochloride. Suspending and dispersing agents include sodium carboxymethylcellulose, hydroxypropyl methylcellulose and polyvinylpyrrolidone. Emulsifying agents include Polysorbate 80 (TWEEN 80). A sequestering or chelating agent of metal ions include EDTA. Pharmaceutical carriers also include ethyl alcohol, polyethylene glycol and propylene glycol for water miscible vehicles and sodium hydroxide, hydrochloric acid, citric acid or lactic acid for pH adjustment.

[0853] In particular, antimicrobial agents (e.g., preservatives) in bacteriostatic or fungistatic concentrations (e.g., an anti-microbial effective amount) can be added to parenteral preparations packaged in multiple-dose containers, which include phenols or cresols, mercurials, benzyl alcohol, chlorobutanol, methyl and propyl p-hydroxybenzoic acid esters, thimerosal, benzalkonium chloride and benzethonium chloride.

[0854] The pharmaceutical compositions also can contain other minor amounts of non-toxic auxiliary substances such as wetting or emulsifying agents, pH buffering agents, stabilizers, solubility enhancers, and other such agents, such as for example, sodium acetate, sorbitan monolaurate, triethanolamine oleate and cyclodextrins. Implantation of a slow-release or sustained-release system, such that a constant level of dosage is maintained (see, e.g., U.S. Pat. No. 3,710,795) also is contemplated herein. The percentage of active compound contained in such parenteral compositions is highly dependent on the specific nature thereof, as well as the activity of the compound and the needs of the subject.

[0855] Lyophilized Powders

[0856] Of interest herein are lyophilized powders, which can be reconstituted for administration as solutions, emulsions and other mixtures. They can also be reconstituted and formulated as solids or gels. The lyophilized powders can be prepared from any of the solutions described above. The pharmaceutical preparations can be presented in lyophilized form for reconstitution with water or other suitable vehicle before use.

[0857] The sterile, lyophilized powder is prepared by dissolving a compound in a buffer solution. The buffer solution can contain an excipient which improves the stability or other pharmacological component of the powder or reconstituted solution, prepared from the powder. Subsequent sterile filtration of the solution followed by lyophilization under standard conditions known to those of skill in the art provides the desired formulation. Briefly, the lyophilized powder is prepared by dissolving an excipient, such as dextrose, sorbitol, fructose, corn syrup, xylitol, glycerin, glucose, sucrose or other suitable agent, in a suitable buffer, such as citrate, sodium or potassium phosphate or other such buffer known to those of skill in the art. Then, a selected enzyme, agent or compound is added to the resulting mixture, and stirred until it dissolves. The resulting mixture is sterile filtered or treated to remove particulates and to insure sterility, and apportioned into vials for lyophilization. Each vial will contain a single dosage (1 mg-1 g, generally 1-100 mg, such as 1-5 mg) or other dosages as described herein, or multiple dosages of the compound. The lyophilized powder can be stored under appropriate conditions, such as at about 4° C. to room temperature.

[0858] Reconstitution of this lyophilized powder with a buffer solution provides a formulation for use in parenteral administration. The precise amount depends upon the indication treated and selected compound. Such amount can be empirically determined.

[0859] 2. Compositions for Other Routes of Administration

[0860] Depending upon the condition treated other routes of administration, such as topical application, transdermal patches, oral and rectal administration are also contemplated herein.

[0861] For example, pharmaceutical dosage forms for rectal administration are rectal suppositories, capsules and tablets for systemic effect. Rectal suppositories include solid bodies for insertion into the rectum which melt or soften at body temperature releasing one or more pharmacologically or therapeutically active ingredients. Pharmaceutically acceptable substances utilized in rectal suppositories are bases or vehicles and agents to raise the melting point. Examples of bases include cocoa butter (theobroma oil), glycerin-gelatin, carbowax (polyoxyethylene glycol) and appropriate mixtures of mono-, di- and triglycerides of fatty acids. Combinations of the various bases can be used. Agents to raise the melting point of suppositories include spermaceti and wax. Rectal suppositories can be prepared either by the compressed method or by molding. The typical weight of a rectal suppository is about 2 to 3 gm. Tablets and capsules for rectal administration are manufactured using the same pharmaceutically acceptable substance and by the same methods as for formulations for oral administration. Formulations suitable for rectal administration can be provided as unit dose suppositories. These can be prepared by admixing the active compound with one or more conventional solid carriers, for example, cocoa butter, and then shaping the resulting mixture.

[0862] For oral administration, pharmaceutical compositions can take the form of, for example, tablets or capsules prepared by conventional means with pharmaceutically acceptable excipients such as binding agents (e.g., pregelatinized maize starch, polyvinyl pyrrolidone or hydroxypropyl methylcellulose); fillers (e.g., lactose, microcrystalline cellulose or calcium hydrogen phosphate); lubricants (e.g., magnesium stearate, talc or silica); disintegrants (e.g., potato starch or sodium starch glycolate); or wetting agents (e.g., sodium lauryl sulphate). The tablets can be coated by methods well-known in the art.

[0863] Formulations suitable for buccal (sublingual) administration include, for example, lozenges containing the active compound in a flavored base, usually sucrose and acacia or tragacanth; and pastilles containing the compound in an inert base such as gelatin and glycerin or sucrose and acacia.

[0864] Topical mixtures are prepared as described for the local and systemic administration. The resulting mixtures can be solutions, suspensions, emulsion or the like and are formulated as creams, gels, ointments, emulsions, solutions, elixirs, lotions, suspensions, tinctures, pastes, foams, aerosols, irrigations, sprays, suppositories, bandages, dermal patches or any other formulations suitable for topical administration.

[0865] The compounds or pharmaceutically acceptable derivatives thereof can be formulated as aerosols for topical application, such as by inhalation (see, e.g., U.S. Pat. Nos. 4,044,126, 4,414,209, and 4,364,923, which describe aerosols for delivery of a steroid useful for treatment of inflammatory diseases, particularly asthma). These formulations, for administration to the respiratory tract, can be in the form of an aerosol or solution for a nebulizer, or as a microfine powder for insufflation, alone or in combination with an inert carrier such as lactose. In such a case, the particles of the formulation will typically have diameters of less than 50 microns, or less than 10 microns.

[0866] The compounds can be formulated for local or topical application, such as for topical application to the skin and mucous membranes, such as in the eye, in the form of gels, creams, and lotions and for application to the eye or for intracisternal or intraspinal application. Topical administration is contemplated for transdermal delivery and also for administration to the eyes or mucosa, or for inhalation therapies. Nasal solutions of the active compound alone or in combination with other pharmaceutically acceptable excipients also can be administered.

[0867] Formulations suitable for transdermal administration are provided. They can be provided in any suitable format, such as discrete patches adapted to remain in intimate contact with the epidermis of the recipient for a prolonged period of time. Such patches contain the active compound in an optionally buffered aqueous solution of, for example, 0.1 to 0.2 M concentration with respect to the active compound. Formulations suitable for transdermal administration also can be delivered by iontophoresis (see, e.g., Tyle, P, Pharmaceutical Research 3(6):318-326 (1986)) and typically take the form of an optionally buffered aqueous solution of the active compound.

[0868] Pharmaceutical compositions also can be administered by controlled release formulations and/or delivery devices (see e.g., in U.S. Pat. Nos. 3,536,809; 3,598,123; 3,630,200; 3,845,770; 3,916,899; 4,008,719; 4,769,027; 5,059,595; 5,073,543; 5,120,548; 5,591,767; 5,639,476; 5,674,533 and 5,733,566).

[0869] 3. Dosages and Administration

[0870] The ADA2 in the composition, such as any described herein including wildtype, variant, conjugate or other modified form, can be formulated as pharmaceutical compositions for single dosage or multiple dosage administration. The protein can be included in an amount sufficient to exert a therapeutically useful effect in the absence of undesirable side effects on the patient treated. For example, the concentration of the pharmaceutically active compound is adjusted so that an injection provides an effective amount to produce the desired pharmacological effect. The therapeutically effective concentration can be determined empirically by testing the protein in known in vitro and in vivo systems such as by using the assays described herein or known in the art. For example, standard clinical techniques can be employed. In addition, in vitro assays and animal models can be employed to help identify optimal dosage ranges. The precise dose, which can be determined empirically, can depend on the age, weight and condition of the patient or animal, the particular ADA2 molecule being administered, the route of administration, the type of disease to be treated and the seriousness of the disease.

[0871] Hence, it is understood that the precise dosage and duration of treatment is a function of the disease being treated and can be determined empirically using known testing protocols or by extrapolation from in vivo or in vitro test data. It is to be noted that concentrations and dosage values also can vary with the severity of the condition to be alleviated. It is to be further understood that for any particular subject, specific dosage regimens should be adjusted over time according to the individual need and the professional judgment of the person administering or supervising the administration of the compositions, and that the concentration ranges set forth herein are exemplary only and are not intended to limit the scope or use of compositions and combinations containing them. The compositions can be administered hourly, daily, weekly, monthly, yearly or once. Generally, dosage regimens are chosen to limit toxicity. It should be noted that the attending physician would know how to and when to terminate, interrupt or adjust therapy to lower dosage due to toxicity, or bone marrow, liver or kidney or other tissue dysfunctions. Conversely, the attending physician would also know how to and when to adjust treatment to higher levels if the clinical response is not adequate (precluding toxic side effects).

[0872] Compositions of an ADA2 protein, such as a wildtype, variant, conjugate or other modified forms thereof, are included in the composition in an amount sufficient to exert a therapeutically useful effect. For example, the amount is one that achieves a therapeutic effect in the treatment of a hyperproliferative disease or condition, such as cancer. Generally, compositions contain 0.5 μg to 100 grams of an ADA2 protein, for example, 20 μg to 10 gram, 20 μg to 50 grams, 20 μg to 1 grams, 20 μg to 500 mg, 20 μg to 200 mg, 20 μg to 5 mg, 20 μg to 0.5 mg, 0.5 mg to 100 grams, 0.5 mg to 10 grams, 0.5 mg to 5 grams, 0.5 mg to 1 gram, 0.5 mg to 500 mg, 0.5 mg to 200 mg, 0.5 mg to 5 mg, 5 mg to 100 gram, 5 mg to 10 grams, 5 mg to 5 grams, 5 mg to 1 gram, 5 mg to 500 mg, 5 mg to 200 mg, 100 mg to 100 gram, 100 mg to 10 grams, 100 mg to 5 grams, 100 mg to 1 gram, 100 mg to 500 mg, 100 mg to 200 mg, 200 mg to 100 gram, 200 mg to 10 grams, 200 mg to 5 grams, 200 mg to 1 gram, 200 mg to 500 mg, 500 mg to 100 gram, 500 mg to 10 grams, 500 mg to 5 grams, 500 mg to 1 gram, 1 gram to 100 gram, 1 gram to 10 grams, 1 gram to 5 grams, 5 grams to 100 grams, 5 grams to 10 grams, or 10 grams to 100 grams. For example, the composition can contain an amount of ADA2 that is at least or at least about or is 1 mg, 5 mg, 10 mg, 20 mg, 30 mg, 40 mg, 50 mg, 60 mg, 70 mg, 80 mg, 90 mg, 100 mg, 200 mg, 300 mg, 400 mg, 500 mg, 600 mg, 700 mg, 800 mg, 900 mg, 1 gram, 5 grams, 10 grams, 20 grams, 30 grams, 40 grams, 50 grams, 60 grams, 70 grams, 80 grams, 90 grams, 100 grams, 200 grams, 300 grams or more.

[0873] In further examples, the composition contains between or between about 1 milliunits (mU) and 10,000 units (U), 1 mU and 1,000 U, 1 mU and 100 U, 1 mU and 10 U, 1 mU and 1 U, 1 mU and 100 mU, 1 mU and 10 mU, 10 mU and 10,000 U, 10 mU and 1,000 U, 10 mU and 100 U, 10 mU and 10 U, 10 mU and 1 U, 10 mU and 100 mU, 100 mU and 10,000 U, 100 mU and 1,000 U, 100 mU and 100 U, 100 mU and 10 U, 100 mU and 1 U, 1 U and 10,000 U, 1 U and 1,000 U, 1 U and 100 U, 1 U and 10 U, 10 U and 10,000 U, 10 U and 1,000 U, 10 U and 100 U, 100 U and 10,000 U, 100 U and 1,000 U, 1,000 U and 10,000 U, of ADA2. For example, the composition can contain an amount of ADA2 that is at least or at least about or is 1 mU, 2 mU, 3 mU, 4 mU, 5 mU, 6 mU, 7 mU, 8 mU, 9 mU, 10 mU, 20 mU, 30 mU, 40 mU, 50 mU, 60 mU, 70 mU, 80 mU, 90 mU, 100 mU, 200 mU, 300 mU, 400 mU, 500 mU, 600 mU, 700 mU, 800 mU, 900 mU, 1 U, 10U, 20 U, 30 U, 40 U, 50 U, 60 U, 70 U, 80 U, 90 U, 100 U, 200 U, 300 U, 400 U, 500 U, 600 U, 700 U, 800 U, 900 U, 1000 U, 2000 U, 3000 U, 4000 U, 5000 U, 6000 U, 7000 U, 8000 U, 9000 U, 10000 U or more.

[0874] The volume of the composition containing the ADA2 provided herein can be between or can be between about 0.1 mL and 100 mL, such as 0.5 mL and 100 mL, 0.5 mL and 50 mL, 0.5 mL and 10 mL, 1 mL and 100 mL, 1 mL and 50 mL, 1 mL and 40 mL, 1 mL and 20 mL, 1 mL and 10 mL, or 3 mL and 10 mL. Typically, volumes of injections or infusions of a composition are at least or at least about 0.01 mL, 0.05 mL, 0.1 mL, 0.2 mL, 0.3 mL, 0.4 mL, 0.5 mL, 1 mL, 2 mL, 3 mL, 4 mL, 5 mL, 6 mL, 7 mL, 8 mL, 9 mL, 10 mL, 20 mL, 30 mL, 40 mL, 50 mL or more.

[0875] Any ADA2 provided herein, wildtype, variants or conjugate (e.g. PEGylated ADA2), can be provided at a concentration of at or about or at least or at least about 1 mU/mL, 10 mU/mL, 20 mU/mL, 10 mU/mL, 20 mU/mL, 30 mU/mL, 40 mU/mL, 50 mU/mL, 60 mU/mL, 70 mU/mL, 80 mU/mL, 90 mU/mL, 100 mU/mL, 200 mU/mL, 300 mU/mL, 400 mU/mL, 500 mU/mL, 600 mU/mL, 700 mU/mL, 800 mU/mL, 900 mU/mL, 1 U/mL, 2 U/mL, 3 U/mL, 4 U/mL, 5 U/mL, 6 U/mL, 7 U/mL, 8 U/mL, 9 U/mL, 10 U/mL, 20 U/mL, 30 U/mL, 40 U/mL, 50 U/mL, 100 U/mL, 150 U/mL, 200 U/mL, 250 U/mL, 400 U/mL, 500 U/mL, 1000 U/mL, 2000 Units/mL, 3000 U/mL, 4000 U/mL, 5000 U/mL, 6000 U/mL, 7000 U/mL, 8000 U/mL, 9000 U/mL, or 10,000 U/mL. The composition can be prepared for use directly or for dilution to the effective concentration prior to use.

[0876] Pharmaceutically and therapeutically active compounds and derivatives thereof are typically formulated and administered in unit dosage forms or multiple dosage forms. Each unit dose contains a predetermined quantity of therapeutically active compound sufficient to produce the desired therapeutic effect, in association with the required pharmaceutical carrier, vehicle or diluent. Unit dosage forms, include, but are not limited to, tablets, capsules, pills, powders, granules, sterile parenteral solutions or suspensions, and oral solutions or suspensions, and oil water emulsions containing suitable quantities of the compounds or pharmaceutically acceptable derivatives thereof. Unit dose forms can be contained in ampoules and syringes or individually packaged tablets or capsules. Unit dose forms can be administered in fractions or multiples thereof. A multiple dose form is a plurality of identical unit dosage forms packaged in a single container to be administered in segregated unit dose form. Examples of multiple dose forms include vials, bottles of tablets or capsules or bottles of pints or gallons. Hence, multiple dose form is a multiple of unit doses that are not segregated in packaging. Generally, dosage forms or compositions containing active ingredient in the range of 0.005% to 100% with the balance made up from non-toxic carrier can be prepared. Pharmaceutical composition can be formulated in dosage forms appropriate for each route of administration.

[0877] The unit-dose parenteral preparations are packaged in an ampoule, a vial or a syringe with a needle. The volume of liquid solution or reconstituted powder preparation, containing the pharmaceutically active compound, is a function of the disease to be treated and the particular article of manufacture chosen for package. All preparations for parenteral administration must be sterile, as is known and practiced in the art.

[0878] As indicated, compositions provided herein can be formulated for any route known to those of skill in the art including, but not limited to, subcutaneous, intramuscular, intravenous, intradermal, intralesional, intraperitoneal injection, epidural, vaginal, rectal, local, otic, transdermal administration or any route of administration. Formulations suited for such routes are known to one of skill in the art. Compositions also can be administered with other biologically active agents, either sequentially, intermittently or in the same composition.

[0879] Pharmaceutical compositions can be administered by controlled release formulations and/or delivery devices (see, e.g., in U.S. Pat. Nos. 3,536,809; 3,598,123; 3,630,200; 3,845,770; 3,847,770; 3,916,899; 4,008,719; 4,687,660; 4,769,027; 5,059,595; 5,073,543; 5,120,548; 5,354,556; 5,591,767; 5,639,476; 5,674,533 and 5,733,566).

[0880] Various delivery systems are known and can be used to administer selected compositions, such as but not limited to, encapsulation in liposomes, microparticles, microcapsules, recombinant cells capable of expressing the compound, receptor mediated endocytosis, and delivery of nucleic acid molecules encoding an ADA2, such as wildtype, variant or modified forms thereof, or other agent such as retrovirus delivery systems. In some embodiments, the compositions contain nucleic acids that encode the variant ADA2 polypeptide provided herein, such as oncolytic viral vectors or gene therapy vectors, or cells, such as modified immune cells for adoptive immunotherapy, and particular compositions can be administered in delivery systems appropriate for the particular composition.

[0881] Hence, in certain embodiments, liposomes and/or nanoparticles also can be employed with administration of compositions and combinations herein. Liposomes are formed from phospholipids that are dispersed in an aqueous medium and spontaneously form multilamellar concentric bilayer vesicles (also termed multilamellar vesicles (MLVs)). MLVs generally have diameters of from 25 nm to 4 μm. Sonication of MLVs results in the formation of small unilamellar vesicles (SUVs) with diameters in the range of 200 to 500 angstroms containing an aqueous solution in the core. In some embodiments, the liposomes can be multivesicular liposomes (MVL).

[0882] Phospholipids can form a variety of structures other than liposomes when dispersed in water, depending on the molar ratio of lipid to water. At low ratios, the liposomes form. Physical characteristics of liposomes depend on pH, ionic strength and the presence of divalent cations. Liposomes can show low permeability to ionic and polar substances, but at elevated temperatures undergo a phase transition which markedly alters their permeability. The phase transition involves a change from a closely packed, ordered structure, known as the gel state, to a loosely packed, less-ordered structure, known as the fluid state. This occurs at a characteristic phase-transition temperature and results in an increase in permeability to ions, sugars and drugs.

[0883] Liposomes interact with cells via different mechanisms: endocytosis by phagocytic cells of the reticuloendothelial system such as macrophages and neutrophils; adsorption to the cell surface, either by nonspecific weak hydrophobic or electrostatic forces, or by specific interactions with cell-surface components; fusion with the plasma cell membrane by insertion of the lipid bilayer of the liposome into the plasma membrane, with simultaneous release of liposomal contents into the cytoplasm; and by transfer of liposomal lipids to cellular or subcellular membranes, or vice versa, without any association of the liposome contents. Varying the liposome formulation can alter which mechanism is operative, although more than one can operate at the same time. Nanocapsules can generally entrap compounds in a stable and reproducible way. To avoid side effects due to intracellular polymeric overloading, such ultrafine particles (sized around 0.1 μm) should be designed using polymers able to be degraded in vivo. Biodegradable polyalkyl-cyanoacrylate nanoparticles that meet these requirements are contemplated for use herein, and such particles can be easily made.

[0884] 4. Packaging and Articles of Manufacture

[0885] Also provided are articles of manufacture containing packaging materials, any pharmaceutical composition provided herein, and a label that indicates that the compositions are to be used for treatment of diseases or conditions as described herein. For example, the label can indicate that the treatment is for a tumor or cancer. The label also can indicate that the treatment is for a disease or condition associated with an elevated marker as described herein, such as elevated or accumulated adenosine levels on tissues or cells, elevated adenosine receptor (ADR) and/or elevated CD73 or CD39 levels.

[0886] Combinations of an ADA2 protein described herein, including a variant, conjugate (e.g. PEGylated ADA2) or other modified form, and another therapeutic agent also can be packaged in an article of manufacture. In one example, the article of manufacture contains a pharmaceutical composition containing an ADA2, such as any ADA2 provided herein, and no further agent or treatment. In other examples, the article of manufacture contains a pharmaceutical composition containing an ADA2 and another further therapeutic agent. For example, the article of manufacture contains a pharmaceutical composition containing an ADA2 and another treatment such as an immune checkpoint inhibitor agent or an antitumor agent. In this example, the agents can be provided together or separately, for packaging as articles of manufacture.

[0887] The articles of manufacture provided herein contain packaging materials. Packaging materials for use in packaging pharmaceutical products are well known to those of skill in the art. See, for example, U.S. Pat. Nos. 5,323,907, 5,052,558 and 5,033,252, each of which is incorporated herein in its entirety. Examples of pharmaceutical packaging materials include, but are not limited to, blister packs, bottles, tubes, inhalers, pumps, bags, vials, containers, syringes, bottles, and any packaging material suitable for a selected formulation and intended mode of administration and treatment. Exemplary of articles of manufacture are containers including single chamber and dual chamber containers. The containers include, but are not limited to, tubes, bottles and syringes. The containers can further include a needle for intravenous administration.

[0888] The choice of package depends on the agents, and whether such compositions will be packaged together or separately. In general, the packaging is non-reactive with the compositions contained therein. In other examples, some of the components can be packaged as a mixture. In other examples, all components are packaged separately. Thus, for example, the components can be packaged as separate compositions that, upon mixing just prior to administration, can be directly administered together. Alternatively, the components can be packaged as separate compositions for administration separately.

[0889] Selected compositions including articles of manufacture thereof also can be provided as kits. Kits can include a pharmaceutical composition described herein and an item for administration provided as an article of manufacture. For example an ADA2 can be supplied with a device for administration, such as a syringe, an inhaler, a dosage cup, a dropper, or an applicator. The compositions can be contained in the item for administration or can be provided separately to be added later. The kit can, optionally, include instructions for application including dosages, dosing regimens and instructions for modes of administration. Kits also can include a pharmaceutical composition described herein and an item for diagnosis.

### H. METHOD OF TREATMENT WITH AN ADENOSINE DEAMINASE 2 (ADA2)

[0890] The methods provided herein include methods of administering or using any adenosine deaminase 2 (ADA2) described herein, such as wildtype, variant, conjugate (e.g. PEGylated ADA2) or other modified forms thereof, for treating subjects having a disease or condition whose symptoms can be ameliorated or lessened by a reduction in adenosine or deoxyadenosine levels in the subject. For example, the disease or condition is one that is associated with elevated adenosine levels. For example, since ADA2 exhibits a low binding affinity for adenosine with a Km of about 200×10⁻⁵ M, it preferentially exhibits activity under conditions of elevated or higher levels of adenosine. Thus, the use of ADA2 as a therapeutic offers the benefit of exhibiting specificity for disease or aberrant environments, while not exhibiting activity under normal environments in which adenosine levels are lower. In particular examples, as described below, the disease or condition is a tumor or a cancer. The subject can be selected based on levels of extracellular adenosine, level of adenosine receptor (ADR) expression, and/or level of ectonucleotidase expression. Additionally, methods of combination therapies with one or more additional agents for treatment, such as an anticancer agent or an anti-hyaluronan agent, also are provided.

[0891] 1. Exemplary Diseases and Conditions

[0892] The concentrations of adenosine, which is physiologically present in the interstitial fluids of unstressed tissues at low levels, can rapidly increase in response to pathological conditions, such as hypoxia, ischemia, tumor environment or trauma. When released into the extracellular space, adenosine functions as a danger signal and through the activation of adenosine receptors (ADRs), various cellular responses are generated to restore tissue homeostasis. Adenosine is associated with a variety of activities that can contribute to the etiology of diseases and conditions, including, but not limited to, stimulation of tumor growth and angiogenesis, inhibition of cytokine synthesis and adhesion of immune cells to the endothelial wall, inhibition of the function of T-cells, macrophages, and natural killer cells, and promotion of tumor metastasis.

[0893] Adenosine deaminases, such as any ADA2 or variants, conjugates or other modified forms thereof described herein, can modulate the extracellular adenosine levels in such conditions by deaminating the adenosine molecules to inosine. Hence, any of such diseases can be treated with an ADA2 described herein, such as a wildtype, variant, conjugate (e.g. PEGylated ADA2) or other modified form. In particular, ADA2 possesses properties that contribute to extracellular stability, such as extensive glycosylation and presence of conserved disulfide bonds, that make it a desirable therapeutic. Provided herein are exemplary diseases and conditions in which ADA2 treatment can be used.

[0894] Compositions containing an ADA2 can be administered by any route that is desired for treatment of the disease or condition. The particular route of administration can depend on the particular disease or condition, the severity of the disease or condition, the particular formulation and other factors within the level of a skilled artisan. Typically, the compositions are administered by intravenous route, although other routes of administration are contemplated, such as any route known to those of skill in the art including intramuscular, intraperitoneal, intravenous, intradermal, intralesional, intraperitoneal injection, epidural, vaginal, rectal, local, otic, transdermal administration or any route of administration.

[0895] a. Cancers and Tumors

[0896] ADA2, such as any described herein, including a wildtype, variant, conjugate (e.g. PEGylated ADA2) or other modified form, can be used to treat a tumor or cancer. High extracellular adenosine in the tumor microenvironments (TME) creates a local immunosuppressive environment, and suppresses the activity of T and NK cells. Through the generation of immunosuppressive TME and ADR signaling to specific tumor and immune cells, adenosine generally creates a TME that is favorable to tumor growth, vascularization and metastasis.

[0897] Agents that modulate adenosine signaling have been shown to have effects in inhibiting tumor growth and modulating downstream cell signaling in a variety of cancer types, such as breast cancer, lung cancer, colon carcinoma, prostate cancer and melanoma cells (Antonioli et al. (2013) Nat Rev Can 13:842-857). Adenosine deaminases, such as any ADA2 or variants, conjugates, or modified forms thereof described herein, can modulate the extracellular adenosine levels in the tumor environment, by deaminating the adenosine molecules to inosine. Thus, any ADA2, variant, conjugate (e.g. PEGylated ADA2), or modified forms thereof can be used as an agent to modulate adenosine levels and signaling, reverse immunosuppression of anti-tumor immune response, and ultimately reduce tumor growth.

[0898] In particular, the diseases and conditions that can be treated or ameliorated by the methods provided herein include, for example, those in which tumor growth is stimulated through high adenosine concentration and/or adenosine receptor (ADR) signaling. For example, TME that actively produces a high concentration of adenosine, thereby creating a local immunosuppressive environment, can be more susceptible to ADA2 treatment.

[0899] Compared to normal adenosine levels of about or approximately 0.1 micromolar, the adenosine levels in the TME rise to about 10 micromolar. Since ADA2 has a high Km and is preferentially active in conditions containing elevated adenosine, as commonly present in the tumor microenvironment (TME), ADA2 can reduce the adenosine levels in the TME by its adenosine deaminase activity. Any ADA2 provided herein, including ADA2 wildtype, variants and modified forms thereof, can be used to treat tumors, including solid tumors, with a high adenosine concentration in the TME.

[0900] In addition, as shown herein, ADA2, or variants, also exhibit various pH optima that can preferentially target regions within the TME. For example, hypoxic regions of the TME generally have a low pH of about or approximately pH 6.5, which is the same as the pH optimum of ADA2. For example, an altered pH is a common microenvironment found in disease states such as in the TME (see e.g. Fogh Andersen et al. (1995) Clin. Chem., 41:1522-1525; Bhujwalla et al. (2002) NMR Biomed., 15:114-119; Helmlinger et al. (1997) Nature Med., 3:177; Gerweck and Seetharaman (1996), Cancer Res. 56(6):1194-1198). For example, in many tumors, Warburg effect creates a microenvironment with a pH ranging from about 5.6 to about 6.8, such as less than or about or pH 5.6, 5.7, 5.8, 5.9, 6.0, 6.1, 6.2, 6.3, 6.4, 6.5, 6.6, 6.7, or 6.8. Thus, ADA2 that are more active at acidic pH than at neutral pH, such as ADA2 wildtype or variants described herein, can be used to treat tumors within the low pH TME, while minimizing activity in non-target disease cells or tissues.

[0901] Thus, administering any ADA2 provided herein to reduce the adenosine concentration in the TME by the enzymatic conversion of adenosine to mosine can be used to prevent tumor growth and metastasis, while minimizing activity at non-target disease cells or tissues.

[0902] The methods provided herein are applicable to treating all types of tumors, including cancers, that are associated with elevated adenosine levels and/or susceptible to a reduction in adenosine or deoxyadenosine levels in the subject to be treated. Broadly, these include tumors of the blood as well as solid tumors. Included among the tumors are those whose growth is suppressed when adenosine levels are reduced. Included among the tumors are those in which reduced adenosine levels allow the subject's immune system to more effectively suppress the growth of the tumor, and/or tumors whose growth is suppressed when reduced levels of adenosine inhibits the blood supply, e.g., hypoxic tumors. In particular, solid tumors are susceptible to treatment by the methods provided herein, because they are more sensitive to the reduction in tumor angiogenesis, resulting from the reduced adenosine levels. High adenosine levels in sections of the TME promotes angiogenesis, and the reduction of adenosine levels using the methods provided herein can result in reduction of the angiogenic effect of adenosine. In addition, high adenosine levels and CD73 activity are associated with cancer cell dissemination and metastasis. Thus, reduction of adenosine levels, effected by the administration of any ADA2 provided herein, can result in the suppression of cancer cell dissemination and metastasis.

[0903] Tumors subject to treatment by the methods provided herein include, but are not limited to, those that originate in the immune system, skeletal system, muscles and heart, breast, gastrointestinal tract, central and peripheral nervous system, renal system, reproductive system, respiratory system, skin, connective tissue systems, including joints, fatty tissues, and circulatory system, including blood vessel walls. Examples of tumors that can be treated by administering any ADA2 or variant or modified form thereof provided herein include carcinomas, gliomas, sarcomas (including liposarcoma), adenocarcinomas, adenosarcomas, and adenomas. Such tumors can occur in virtually all parts of the body, including, for example, breast, heart, lung, small intestine, colon, spleen, kidney, bladder, head and neck, ovary, prostate, brain, pancreas, skin, bone, bone marrow, blood, thymus, uterus, testicles, cervix or liver.

[0904] Tumors of the skeletal system include, for example, sarcomas and blastomas such as osteosarcoma, chondrosarcoma, and chondroblastoma. Muscle and heat tumors include tumors of both skeletal and smooth muscles, e.g., leiomyomas (benign tumors of smooth muscle), leiomyosarcomas, rhabdomyomas (benign tumors of skeletal muscle), rhabdomyosarcomas, cardiac sarcoma. Tumors of the gastrointestinal tract include e.g., tumors of the mouth, esophagus, stomach, small intestine, colon and colorectal tumors, as well as tumors of gastrointestinal secretory organs such as salivary glands, liver, pancreas, and the biliary tract. Tumors of the central nervous system include tumors of the brain, retina, and spinal cord, and can also originate in associated connective tissue, bone, blood vessels or nervous tissue. Treatment of tumors of the peripheral nervous system are also contemplated. Tumors of the peripheral nervous system include malignant peripheral nerve sheath tumors. Tumors of the renal system include those of the kidneys, e.g., renal cell carcinoma, as well as tumors of the ureters and bladder. Tumors of the reproductive system include tumors of the cervix, uterus, ovary, prostate, testes and related secretory glands. Tumors of the immune system include both blood based and solid tumors, including lymphomas, e.g., both Hodgkin's and non-Hodgkin's. Tumors of the respiratory system include tumors of the nasal passages, bronchi and lungs. Tumors of the breast include, e.g., both lobular and ductal carcinoma.

[0905] Other examples of tumors that can be treated with any ADA2 or variant or modified form thereof provided herein include Kaposi's sarcoma, CNS neoplasms, neuroblastomas, capillary hemangioblastomas, meningiomas and cerebral metastases, melanoma, gastrointestinal and renal carcinomas and sarcomas, rhabdomyosarcoma, glioblastoma (such as glioblastoma multiforme) and leiomyosarcoma. Examples of cancer that can be treated with any ADA2 or variant or modified form thereof provided herein include but are not limited to lymphoma, blastoma, neuroendocrine tumors, mesothelioma, schwannoma, meningioma, melanoma, and leukemia or lymphoid malignancies. Examples of such cancers include hematologic malignancies, such as Hodgkin's lymphoma; non-Hodgkin's lymphomas (Burkitt's lymphoma, small lymphocytic lymphoma/chronic lymphocytic leukemia, mycosis fungoides, mantle cell lymphoma, follicular lymphoma, diffuse large B-cell lymphoma, marginal zone lymphoma, hairy cell leukemia and lymphoplasmacytic leukemia), tumors of lymphocyte precursor cells, including B-cell acute lymphoblastic leukemia/lymphoma, and T-cell acute lymphoblastic leukemia/lymphoma, thymoma, tumors of the mature T and NK cells, including peripheral T-cell leukemias, adult T-cell leukemia/T-cell lymphomas and large granular lymphocytic leukemia, Langerhans cell histiocytosis, myeloid neoplasias such as acute myelogenous leukemias, including AML with maturation, AML without differentiation, acute promyelocytic leukemia, acute myelomonocytic leukemia, and acute monocytic leukemias, myelodysplastic syndromes, and chronic myeloproliferative disorders, including chronic myelogenous leukemia; tumors of the central nervous system such as glioma, glioblastoma, neuroblastoma, astrocytoma, medulloblastoma, ependymoma, and retinoblastoma; solid tumors of the head and neck (e.g., nasopharyngeal cancer, salivary gland carcinoma, and esophageal cancer), lung (e.g., small-cell lung cancer, non-small cell lung cancer, adenocarcinoma of the lung and squamous carcinoma of the lung), digestive system (e.g., gastric or stomach cancer including gastrointestinal cancer, cancer of the bile duct or biliary tract, colon cancer, rectal cancer, colorectal cancer, and anal carcinoma), reproductive system (e.g., testicular, penile, or prostate cancer, uterine, vaginal, vulval, cervical, ovarian, and endometrial cancer), skin (e.g., melanoma, basal cell carcinoma, squamous cell cancer, actinic keratosis, cutaneous melanoma), liver (e.g., liver cancer, hepatic carcinoma, hepatocellular cancer, and hepatoma), bone (e.g., osteoclastoma, and osteolytic bone cancers) additional tissues and organs (e.g., pancreatic cancer, bladder cancer, kidney or renal cancer, thyroid cancer, breast cancer, cancer of the peritoneum, and Kaposi's sarcoma), tumors of the vascular system (e.g., angiosarcoma and hemangiopericytoma), Wilms' tumor, retinoblastoma, osteosarcoma and Ewing's sarcoma.

[0906] b. Non-Cancer Hyperproliferative Diseases

[0907] Any ADA2 described herein, such as a wildtype, variant, conjugate (e.g. PEGylated ADA2) or other modified form thereof, can be used to treat a non-cancer hyperproliferative disease in a subject. Adenosine and ADR signaling play a role in various signaling pathways that include G-protein-coupled receptors (GPCRs), cyclic AMP (cAMP) signaling, and/or cytokine signaling, to a variety of cellular responses such as mitogen activated protein kinase activation, gene transcription and proliferation. Activation of certain adenosine receptors (ADRs), such as the A1 receptor, can initiate cellular pathways leading to cellular proliferation. Overexpression and/or overstimulation can result in hyperproliferation. Any ADA2 provided herein can be used to treat non-cancer hyperproliferative disorders by reducing the activation of ADRs in cells involved in the hyperproliferative disorders.

[0908] Examples of hyperproliferative diseases that can be treated by any ADA2 provided herein, including wildtype, variants and modified forms thereof provided herein include any hyperproliferative diseases, including, for example, psoriasis, actinic keratoses, and seborrheic keratoses, warts, keloid scars, and eczema. Also included are hyperproliferative diseases caused by virus infections, such as papilloma virus infection. Different types of psoriasis can display characteristics such as pus-like blisters (pustular psoriasis), severe sloughing of the skin I (erythrodermic psoriasis), drop-like dots (guttae psoriasis) and smooth inflamed lesions (inverse psoriasis). It is understood that treatment of psoriasis includes treatment of all types of psoriasis (e. g., psoriasis vulgaris, psoriasis pustulosa, psoriasis erythrodermica, psoriasis arthropathica, parapsoriasis, palmoplantar pustulosis).

[0909] c. Fibrotic Diseases

[0910] Any ADA2 described herein, such as a wildtype, variant, conjugate (e.g. PEGylated ADA2) or other modified form thereof, can be used to treat fibrotic diseases, and particularly those associated with elevated adenosine. Adenosine levels are elevated in stressed conditions, such as hypoxia, ischemia, inflammation, tumor environment or trauma. In these conditions, extracellular adenosine works as a danger signal, and promotes various responses for tissue homeostasis. However, the persistence of increased adenosine concentrations beyond the acute-injury phase can become detrimental to tissues by activating pathways that trigger immune suppression or promote an unremitting wound-healing process, which leads to fibrotic remodeling (Antonioli et al. (2013) Nat Rev Can 13:842-857). Administration of ADA2 provided herein, which can reduce the stress-related increase in extracellular adenosine, can be used to treat diseases or conditions associated with excessive fibrotic tissue deposition, such as fibrosis, the formation of excess fibrous connective tissue in an organ or tissue in a reparative or reactive process. Diseases or conditions associated with fibrosis include, for example, fibrosis of the lungs, including Idiopathic pulmonary fibrosis and cystic fibrosis; fibrosis of the liver, including cirrhosis; fibrosis of the heart, including endomyocardial fibrosis, myocardial infarction, atrial fibrosis; and other fibrosis conditions, including mediastinal fibrosis (fibrosis of the soft tissue of the mediastinum), myelofibrosis (fibrosis of the bone marrow), retroperitoneal fibrosis (fibrosis of the soft tissue of the retroperitoneum), progressive massive fibrosis (fibrosis of the lungs), nephrogenic systemic fibrosis (fibrosis of the skin), Crohn's Disease (fibrosis of the intestine), keloid (fibrosis of the skin), scleroderma/systemic sclerosis (fibrosis of the skin, lungs), arthrofibrosis (fibrosis of the knee, shoulder, other joints), Peyronie's disease (fibrosis of the penis), Dupuytren's contracture (fibrosis of the hands, fingers), and adhesive capsulitis (fibrosis of the shoulder).

[0911] d. Infectious Diseases

[0912] Any ADA2 described herein, such as a wildtype, variant, conjugate (e.g. PEGylated ADA2) or other modified form thereof, can be used to treat infectious diseases associated with elevated adenosine. Invasive pathogens can take advantage of the host's endogenous immunosuppressive mechanisms, such as adenosine-mediated immunosuppression, to promote spread or survival within the host. For example, Candida albicans hyphae release adenosine to suppress the neutrophil-mediated killing of the organism, and Staphylococcus aureus also produce adenosine to suppress the host's immune response. In addition, increased susceptibility to infection in neonates and the elderly is also associated with elevated adenosine levels signaling (Hasko et al. (2013) Front Immunol. 4:85).

[0913] Therefore, in certain infectious diseases, ADA2 can be used as treatment to decrease the adenosine-mediated immunosuppression. Any ADA2 provided herein, including wildtype, variants and modified forms thereof, can be used to treat infectious diseases. Infectious diseases that can be treated by any ADA2 provided herein include, but are not limited to, diseases caused by pathogens such as viruses, bacteria, fungi, protozoa, and parasites. Infectious diseases can be caused by viruses including adenovirus, cytomegalovirus, dengue, Epstein-Barr, hanta, hepatitis A, hepatitis B, hepatitis C, herpes simplex type I, herpes simplex type II, human immunodeficiency virus, (HIV), human papilloma virus (HPV), influenza, measles, mumps, papova virus, polio, respiratory syncytial virus, rinderpest, rhinovirus, rotavirus, rubella, SARS virus, smallpox and viral meningitis. Infectious diseases can also be caused by bacteria including Bacillus anthracis, Borrelia burgdorferi, Campylobacter jejuni, Chlamydia trachomatis, Clostridium botulinum, Clostridium tetani, Diphtheria, Escherichia coli, Legionella, Helicobacter pylori, Mycobacterium rickettsia, Mycobacterium tuberculosis, Mycoplasma Neisseria, Pertussis, Pseudomonas aeruginosa, Streptococcus pneumoniae, Streptococcus, Staphylococcus, Vibrio cholerae and Yersinia pestis. Infectious diseases can also be caused by fungi such as Aspergillus fumigatus, Blastomyces dermatitidis, Candida albicans, Coccidioides immitis, Cryptococcus neoformans, Histoplasma capsulatum and Penicillium marneffei. Infectious diseases can also be caused by protozoa and parasites such as chlamydia, kokzidiose, leishmania, malaria, rickettsia, and trypanosoma.

[0914] e. Other Diseases and Conditions

[0915] Individuals who harbor deleterious mutations in the ADA1 gene can develop varying degrees of immunodeficiency disorder, from mild to severe. Such immunodeficiency disorder is due to the toxic accumulation of the enzyme substrates, adenosine and deoxyadenosine, in the immature lymphoid cells. The onset of the disorder can also range from early childhood to adults, depending on the mutations inherited. Deficiencies of ADA1 are one of the leading causes of severe combined immunodeficiency disease (SCID) in children and is one of the leading targets for gene therapy approaches (R. Parkman et al., 2000, “Gene therapy for adenosine deaminase deficiency,” Ann. Rev. Med. 51:33-47).

[0916] An ADA2 provided herein, such as wildtype, variant, conjugate (e.g. PEGylated ADA2), or other modified forms, can be used in the treatment of SCID or other ADA1-mediated immunodeficiencies. Immunodeficiencies are generally categorized as either acquired immunodeficiencies or inherited immunodeficiencies. Acquired immunodeficiencies include human immunodeficiency virus-1 (HIV-1) infection, herpes virus infections, Epstein-Barr virus infections, lepromatous leprosy and diminished immune capacity resulting from skin burns in burn patients, i.e. burn-related immunodeficiency. Inherited immunodeficiencies include several genetically different forms of SCID, including adenosine deaminase deficiency dependent SCID (ADA SCID), SCID autosomal recessive with and without B cells (no ADA deficiency), SCID X-linked recessive without B cells, SCID autosomal recessive (with ADA deficiency), purine nucleotide phosphorylase deficiency (PNP SCID), severe combined immune deficiency (IL-2 receptor deficiency; i.e. X-linked SCID), and bare lymphocyte syndrome. Other immunodeficiencies include various forms of congenital or genetically determined hematopoietic abnormalities, several high risk leukemias and several forms of severe life-threatening aplastic anemia. Still other immunodeficiencies that can be treated include Wiskott-Aldrich syndrome; Blackfan-Diamond syndrome; Fanconi anemia; severe neutrophil dysfunction; chronic granulomatous disease of childhood; severe (Kostman-type) agranulocytosis; immunodeficiency and neutropenia of cartilage-hair hypoplasia; infantile and late onset osteoporosis; aplastic anemia-toxic chemical, idiopathic, immunological, and genetic (non-Fanconi); acute myeloid leukemia; chronic myeloid leukemia; Burkitt lymphoma, and recurrent acute lymphatic leukemia. In particular examples, the immune system disorder that is treated is adenosine deaminase deficiency-dependent severe combined immunodeficiency (ADA SCID).

[0917] 2. Methods of Patient Selection

[0918] Provided herein are methods of patient selection for treatment with any ADA2 provided herein, based on the level of adenosine-associated biomarkers described herein. Exemplary adenosine-associated biomarkers include plasma adenosine levels, adenosine receptor (ADR) levels and ectonucleotidase levels.

[0919] For example, subjects with elevated adenosine levels in the plasma or other samples, can be more responsive to treatment using ADA2, as the effects of ADA2 administration directly reduce the elevated extracellular adenosine levels. In another example, subjects that express elevated or high levels of ADRs, such as the A2A and A2B adenosine receptors in samples, such as tumor samples, can be more responsive to treatments using ADA2, as the effects on adenosine and tumor growth can be mediated directly by binding to ADRs expressed on tumor cells. In a further example, subjects with elevated levels or expression of the CD39 and CD73 ectonucleotidases in the tumor sample or other samples can be more responsive to treatment using ADA2, as the increased expression of CD39 and CD73 lead to elevated adenosine levels, and elevated adenosine levels, via signaling through the ADRs, have downstream cancer promoting effects. Thus, these biomarkers can be used to select or identify patients predicted to be responsive to treatment and/or to monitor treatment and efficacy of treatment, thereby providing an improved treatment regimen of adenosine-associated diseases or conditions, such as a tumor or a cancer, using any ADA2 provided herein.

[0920] a. Adenosine-Associated Biomarkers

[0921] Provided herein are methods of selecting patients that have tumors in which treatment with ADA2 is applicable. The methods provided herein are applicable to treating conditions and diseases that are associated with elevated adenosine levels and/or susceptible to a reduction in adenosine or deoxyadenosine levels in the subject to be treated. For example, such conditions or diseases include a tumor or a cancer. Levels of adenosine-associated biomarkers, such as plasma adenosine levels, adenosine receptor (ADR) levels and ectonucleotidase levels, can be used for diagnosis or prognosis of an adenosine-associated disease or condition, to predict responsiveness of a subject having an adenosine-associated disease or condition to any ADA2 or combination therapy provided herein, and/or to monitor or predict efficacy of treatment of a subject having an adenosine-associated disease or condition that has been treated with an ADA2 provided herein, including wildtype, variants and modified forms thereof.

[0922] In any examples provided herein, the adenosine-associated diseases or conditions are diseases and conditions in which adenosine levels are elevated as cause, consequence or otherwise observed in the disease or condition. Exemplary adenosine-associated diseases or conditions, include, but are not limited to, a cancer, a tumor, an inflammatory disease, an infection, and other conditions and diseases associated with elevated adenosine levels and/or is susceptible to a reduction in adenosine or deoxyadenosine levels in the subject to be treated. In particular, adenosine-associated diseases and conditions, include, but are not limited to, cancers with elevated adenosine levels in the extracellular environment, for example, tumors, including solid tumors that are hypoxic. Provided herein are methods of treatment that includes measurement of adenosine-associated biomarkers and selection of subjects for treatment with any ADA2 provided herein.

[0923] i. Plasma Adenosine Levels

[0924] In one example, a patient or subject can be selected for treatment with any ADA2 provided herein, based on the levels or expression of extracellular adenosine in the sample, such as the plasma. In other examples, the level of extracellular adenosine in the tumor microenvironment of a specific tumor can be used. Plasma adenosine level can be measured using any methods known in the art, including chromatography-based methods. It is within the level of one of skill in the art to assess, quantify, determine and/or detect adenosine levels in a plasma sample using assays known in the art. Assays include in vitro or in vivo assays. Exemplary assays that can be used to assess, evaluate, determine, quantify and/or otherwise specifically detect adenosine levels in a sample include, but are not limited to, high performance liquid chromatography (HPLC)-based assays (see, e.g., Jackson and Ohnishi (1987) Hypertension 10:189-197), spectrophotometric methods, radioenzymatic assays (see, e.g., German and Kredich (1984) Anal Biochem. 142(2):536-541), microelectrode-based detection, and in vivo imaging methods, such as bioluminescence-based methods. In some examples, plasma adenosine levels can be detected using a modified HPLC method that utilizes a reaction that converts adenosine into a fluorescent derivative, such as 1,N⁶-ethanoadenosine for detection of adenosine levels. (Howard et al. (1998) Investigative Opthalmology & Visual Science, 39(10):1942-1946).

[0925] ii. Adenosine Receptors (ADRs)

[0926] The level of expression of adenosine receptors (ADRs) can be used as biomarkers for the selection of patients or subjects for treatment with any ADA2 provided herein. In particular, ADRs that are expressed in tumor cells and/or immune cells involved in tumor immunity, such as the A2A (amino acid sequence set forth in SEQ ID NO:534) and A2B (amino acid sequence set forth in SEQ ID NO:535) adenosine receptors, can be used. Tumors that express elevated or high levels of ADRs, such as the A2A and A2B adenosine receptors, can be more responsive to treatments using ADA2, as the effects on adenosine and tumor growth can be mediated by adenosine binding to ADRs expressed on tumor cells. Some tumors have elevated expression of ADRs, in particular, A2A and A2B, and the expression of these receptors have downstream cancer-promoting effects. In other examples, adenosine signaling, through the stimulation of A2A and A2B receptors, regulate endothelial inflammatory processes and tumor angiogenesis. In other examples, expression of ADRs, such as the A2A and A2B adenosine receptors, have inhibitory effects on activation and differentiation of immune cells, such as macrophages and dendritic cells. Therefore, measurements of ADRs, such as the A2A and A2B adenosine receptors can be used to select tumors, including cancers, that are associated with elevated adenosine levels and/or susceptible to a reduction in adenosine or deoxyadenosine levels. Levels of ADRs, such as the A2A and A2B adenosine receptors, can be used to select or identify patients predicted to be responsive to treatment and/or to monitor treatment and efficacy of treatment, thereby providing an improved treatment regimen of adenosine-associated diseases or conditions, such as a tumor or a cancer.

[0927] For example, a patient or subject can be selected for treatment with any ADA2 provided herein, based on the levels or expression of the A2A and A2B adenosine receptors in a sample, such as a tumor or fluid sample from a subject having a tumor or suspected of having a tumor. Level of expression of ADRs, for example, the A2A and A2B adenosine receptors, can be measured using any methods known in the art for determining levels of extracellular receptors on a cell. It is within the level of one of skill in the art to assess, quantify, determine and/or detect levels of ADRs, such as those of A2A and A2B adenosine receptors, in a sample using assays known in the art. Assays include in vitro or in vivo assays. Exemplary assays that can be used to assess, evaluate, determine, quantify and/or otherwise specifically detect levels of ADRs, such as those of A2A and A2B adenosine receptors, in a sample include, but are not limited to, solid phase binding assays (e.g. enzyme linked immunosorbent assay (ELISA)), radioimmunoassay (RIA), immunoradiometric assay, fluorescence assay, chemiluminescent assay, bioluminescent assay, western blot and histochemistry methods, such as immunohistochemistry (IHC) or pseudo immunohistochemistry using a non-antibody binding agent. In solid phase binding assay methods, such as ELISA methods, for example, the assay can be a sandwich format or a competitive inhibition format. In other examples, in vivo imaging methods can be used.

[0928] The methods provided herein are directed to measurement of ADR protein levels, such as that of the A2A and A2B adenosine receptors, in a sample, such as a tumor or fluid sample from a subject having a tumor or suspected of having a tumor, using antibodies against ADRs, such as the A2A and A2B adenosine receptors. Exemplary antibodies against adenosine receptor A2A include those from Santa Cruz Biotechnology (Dallas, Tex.; Cat no. sc-70321), Abcam (Cambridge, UK; Cat no. ab3461), and EMD Millipore (Billerica, Mass.; Cat no. AB1559P). Exemplary antibodies against adenosine receptor A2B include those from Santa Cruz Biotechnology (Dallas, Tex.; Cat no. sc-7505), Abcam (Cambridge, UK; Cat no. ab40002), and EMD Millipore (Billerica, Mass.; Cat no. AB1589P). The antibodies can be used to detect the ADR protein levels in samples, using methods such as immunohistochemistry, ELISA, RIA, immunoradiometric assay, fluorescence assay, chemiluminescent assay, bioluminescent assay, and western blot. The antibodies can be modified by conjugation, directly or indirectly, to biotin, a fluorescent moiety, a radiolabel or other detectable label. In other examples, secondary antibodies, which are conjugated to a detectable label, can be used.

[0929] ADR levels, such as that of the A2A and A2B adenosine receptors, can also be determined using in vivo imaging methods. For example, positron emission tomography (PET) with the administration of xanthine derivatives, which have A2A receptor antagonist activity, radiolabeled with the positron emitter carbon-11 (¹¹C), such as ¹¹C-SCH442416, ¹¹C-KF1783, ¹¹C-KF18446, ¹¹C-KF19631, ¹¹C-CSC, ¹¹C-KW-6002 and ¹¹C-TMSX (Grachev et al. (2014) Journal of Diagnostic Imaging in Therapy 1(1):1-19).

[0930] Other methods of determining ADR levels, such as that of the A2A and A2B adenosine receptors, include nucleic acid based methods, such as reverse transcriptase-polymerase chain reaction (RT-PCR), microarrays, quantitative PCR, high-throughput transcriptome sequencing, and other such methods.

[0931] iii. Ectonucleotidases CD39 and CD73

[0932] The level of expression of ectonucleotidases CD39 and CD73 that are expressed in tumor cells can be used as biomarkers for the selection of patients or subjects for treatment with any ADA2 provided herein. CD39 and CD73 are the ectonucleotidases that generate extracellular adenosine from adenosine triphosphate (ATP). CD39 (Ectonucleoside triphosphate diphosphohydrolase 1; EC 3.6.1.5; amino acid sequence set forth in SEQ ID NO:542) metabolizes extracellular ATP to generate adenosine diphosphate (ADP) and adenosine monophosphate (AMP), and CD73 (ecto-5′-nucleotidase; EC 3.1.3.5; amino acid sequence set forth in SEQ ID NO:543) metabolizes AMP to generate adenosine. CD39 and CD73 are the major source of extracellular adenosine during conditions associated with a rapid elevation of adenosine levels, such as hypoxia, ischemia, inflammation, tumor environment or trauma. In these conditions, extracellular ATP increases, which leads to a subsequent increase in adenosine levels, by the action of CD39 and CD73 ectonucleotidases. In certain cancer types, the level of CD39 and CD73 are overexpressed, and elevated CD73 levels are associated with poor prognosis and high early tumor recurrence. Thus, the level of expression of ectonucleotidases CD39 and CD73 can be used as a biomarker for tumors associated with elevated adenosine levels and for selection of patients for treatment with any ADA2 provided herein.

[0933] For example, a patient or subject can be selected for treatment with any ADA2 provided herein, based on the levels or expression of the CD39 and CD73 ectonucleotidases in a sample, such as a tumor or fluid sample from a subject having a tumor or suspected of having a tumor, or immune cells. Level of expression of CD39 and CD73 ectonucleotidases can be measured using any methods known in the art for determining levels of plasma membrane or extracellular proteins. It is within the level of one of skill in the art to assess, quantify, determine and/or detect the level of expression CD39 and CD73 ectonucleotidases in a sample using assays known in the art. Assays include in vitro or in vivo assays. Exemplary assays that can be used to assess, evaluate, determine, quantify and/or otherwise specifically detect the level of expression CD39 and CD73 ectonucleotidases in a sample include, but are not limited to, solid phase binding assays (e.g. enzyme linked immunosorbent assay (ELISA)), radioimmunoassay (RIA), immunoradiometric assay, fluorescence assay, chemiluminescent assay, bioluminescent assay, western blot and histochemistry methods, such as immunohistochemistry (IHC) or pseudo immunohistochemistry using a non-antibody binding agent. In solid phase binding assay methods, such as ELISA methods, for example, the assay can be a sandwich format or a competitive inhibition format. In other examples, in vivo imaging methods can be used.

[0934] The methods provided herein are directed to measurement of CD39 and CD73 ectonucleotidases in a sample, such as a tumor or fluid sample from a subject having a tumor or suspected of having a tumor, using antibodies against CD39 and CD73 ectonucleotidases. Exemplary antibodies against CD39 include those from Santa Cruz Biotechnology (Dallas, Tex.; Cat no. sc-65262), Abcam (Cambridge, UK; Cat no. ab49580), and EMD Millipore (Billerica, Mass.; Cat no. 04-973). Exemplary antibodies against CD73 include those from Santa Cruz Biotechnology (Dallas, Tex.; Cat no. sc-8502), Abcam (Cambridge, UK; Cat no. ab4056), and EMD Millipore (Billerica, Mass.; Cat no. IHCR2023-6). The antibodies can be used to detect the ADR protein levels in samples, using methods such as immunohistochemistry, ELISA, RIA, immunoradiometric assay, fluorescence assay, chemiluminescent assay, bioluminescent assay, and western blot. The antibodies can be modified by conjugation, directly or indirectly, to biotin, a fluorescent moiety, a radiolabel or other detectable label. In other examples, secondary antibodies, which are conjugated to a detectable label, can be used.

[0935] Other methods of determining CD39 and CD73 ectonucleotidase levels include nucleic acid based methods, such as reverse transcriptase-polymerase chain reaction (RT-PCR), microarrays, quantitative PCR, high-throughput transcriptome sequencing, and other such methods.

[0936] b. Patient Selection

[0937] Once the amount of the level of biomarkers, such as plasma adenosine levels, levels of ADRs such as A2A or A2B, or levels of CD39 and CD73 ectonucleotidases, is determined the amount can be compared to a control or threshold level. The control or threshold level is generally a predetermined threshold level or amount that is indicative of disease or condition associated with elevated adenosine levels (e.g. a tumor or cancer). Such level or amount can be empirically determined by one of skill in the art. It is understood that the particular predetermined selection or classification criteria for the methods herein are dependent on the particular assay that is used to detect the level of adenosine-associated biomarkers and the particular sample that is being tested. It is within the level of one of skill in the art to determine if an assay is compatible with testing a particular sample. In vitro solid phase assays or high performance liquid chromatography (HPLC) based assays can be used for testing body fluid samples. Assays such as histochemistry or immunohistochemistry can be used for testing tissue samples. It also is understood that in methods involving comparisons to a predetermined level or amount or to a control or reference sample that the references are made with the same type of sample and using the same assay and reagents (including the same detectable moiety and detection method).

[0938] For example, the predetermined threshold level can be determined based on the level or amount of the marker in a reference or control sample, such as the median or mean level or amount of the marker in a population of subjects, in order to assess differences in levels or expression. In one example, the predetermined threshold level can represent the mean or median level or amount of the adenosine-associated biomarker in a sample from a healthy subject or a subject known to have a condition or disease associated with elevated adenosine levels (e.g. a tumor or cancer). In one embodiment, the predetermined level or amount of the adenosine-associated biomarker from a normal tissue or bodily fluid sample is the mean level or amount observed in normal samples (e.g., all normal samples analyzed). In another embodiment, the level or amount of the adenosine-associated biomarker from a normal tissue or bodily fluid sample is the median value for the level or amount observed in normal samples. The predetermined threshold level also can be based on the level or amount of the adenosine-associated biomarker in a cell line or other control sample (e.g. tumor cell line). As described herein, these predetermined values can be determined by comparison or knowledge of the adenosine-associated biomarker levels in a corresponding normal sample as determined by the same assay of detection and using the same reagents, for example, the same antibody and detection method.

[0939] The reference or control sample can be another tissue, cell or body fluid, such as a normal tissue, cell or body fluid, for example, a tissue, cell or body fluid that is analogous to the sample being tested, but isolated from a different subject. The control or reference subject can be a subject or a population of subjects that is normal (i.e. does not have a disease or condition), a subject that has a disease but does not have the type of disease or condition that the subject being tested has or is suspected of having, for example, a subject that does not have a condition or disease associated with elevated adenosine levels (e.g. a tumor or cancer), or an analogous tissue from another subject that has a similar disease or condition, but whose disease is not as severe and/or expresses relatively less of the adenosine-associated biomarker. For example, when the cell, tissue or fluid being tested is a subject or a population of subjects having a cancer, the level or amount of the marker can be compared to the level or amount of the marker in a tissue, cell or fluid from a subject having a less severe cancer, such as an early stage, differentiated or other type of cancer. In another example, a control or reference sample is a fluid, tissue, extract (e.g. cellular or nuclear extract), nucleic acid or peptide preparation, cell line, biopsy, standard or other sample, with a known amount or relative amount of the adenosine-associated biomarker, such as a sample, for example a tumor cell line or tumors from tumor models generated using such cell lines.

[0940] In any method herein, the level(s) of the adenosine-associated biomarker in samples from subjects suspected or known to have a condition or disease associated with elevated adenosine levels (e.g., cancer) can be determined concurrently with the determination of level(s) of the adenosine-associated biomarker in reference or normal tissues. Alternatively, the levels of the adenosine-associated biomarker in samples from subjects suspected or known to have a condition or disease associated with elevated adenosine levels (e.g. cancer) can be compared to the level(s) of the adenosine-associated biomarker previously determined in normal tissue or bodily fluid. Thus, the level of the adenosine-associated biomarker in normal or healthy samples or other reference samples employed in any detection, comparison, determination, or evaluation can be a level or amount determined prior to any detection, determination, or evaluation of the level or amount of the adenosine-associated biomarker in a sample from a human patient.

[0941] The level or amount of the adenosine-associated biomarker of is determined and/or scored and compared to predetermined phenotypes of the adenosine-associated biomarker associated with disease. It is within the level of one of skill in the art to determine the threshold level for disease diagnosis depending on the particular disease, the assay being used for detection of the adenosine-associated biomarker and/or the detection reagent being used. It is within the level of one of skill in the art to determine the threshold level of the adenosine-associated biomarker for classifying responsiveness to treatment with any ADA2 provided herein. Exemplary methods for stratification of tumor samples or bodily fluid samples for diagnosis, prognosis or selection of subjects for treatment are provided herein.

[0942] It is understood that the particular change, e.g. increase in or decrease of the adenosine-associated biomarker is dependent on the assay used. In an ELISA, the fold increase or decrease in absorbance at a particular wavelength or in quantity of protein (e.g. as determined by using a standard curve) can be expressed relative to a control. In a PCR assay, such as RT-PCR, expression levels can be compared to control expression levels (e.g. expressed as fold change) using methods known to those in the art, such as using standards.

[0943] In particular examples of the methods herein, a subject is selected as a candidate for therapy with any ADA2 provided herein, if the amount of the adenosine-associated biomarker is determined to be elevated in the sample. For example, elevated or accumulated adenosine-associated biomarker levels in a diseased subject compared to a healthy or normal subject is indicative of a condition or disease associated with elevated adenosine levels (e.g. tumor or cancer). The adenosine-associated biomarker can be elevated 0.5-fold, 1-fold, 2-fold, 3-fold, 4-fold, 5-fold, 6-fold, 7-fold, 8-fold, 9-fold, 10-fold, 15-fold, 20-fold, 30-fold, 40-fold, 50-fold, 60-fold, 70-fold, 80-fold, 90-fold, 100-fold, 150-fold, 200-fold, 500-fold, 1000-fold or more. Thus, in examples of the methods herein, when the amount of the adenosine-associated biomarker in a sample from a subject is being tested, detection of the marker can be determining that the amount of the adenosine-associated biomarker in the sample (e.g. cancerous cell, tissue or fluid) from the subject is elevated compared to a predetermined level or amount or control sample. In one example, the subject is determined to have a condition or disease associated with elevated adenosine levels if the amount of the adenosine-associated biomarker in the tissue, cell or fluid is elevated at or about 0.5-fold, 1-fold, 2-fold, 3-fold, 4-fold, 5-fold, 6-fold, 7-fold, 8-fold, 9-fold, 10-fold, 15-fold, 20-fold, 30-fold, 40-fold, 50-fold, 60-fold, 70-fold, 80-fold, 90-fold, 100-fold, 150-fold, 200-fold, 500-fold, 1000-fold or more, compared to the predetermined level or amount or control sample.

[0944] A subject can be selected as a candidate for therapy with any ADA2 provided herein, including wildtype, variants and modified forms thereof, based on the level or amount of adenosine levels in a sample (e.g. plasma) from the subject. For example, plasma adenosine levels greater than 0.1 mM, such as 0.1 mM, 0.2 mM, 0.3 mM, 0.4 mM, 0.5 mM, 0.6 mM, 0.7 mM, 0.8 mM, 0.9 mM, 1 mM, 2 mM, 3 mM, 4 mM, 5 mM, 6 mM, 7 mM, 8 mM, 9 mM, 10 mM or higher, correlates to the presence of a tumor or cancer. Using such methods, in exemplary methods provided herein, a subject can be selected for treatment with any ADA2 provided herein if the adenosine level in the fluid sample, such as a plasma sample, is greater than 0.1 mM, such as 0.1 mM, 0.2 mM, 0.3 mM, 0.4 mM, 0.5 mM, 0.6 mM, 0.7 mM, 0.8 mM, 0.9 mM, 1 mM, 2 mM, 3 mM, 4 mM, 5 mM, 6 mM, 7 mM, 8 mM, 9 mM, 10 mM or higher.

[0945] A subject can be selected as a candidate for therapy with any ADA2 provided herein, based on the level or amount of the adenosine-associated biomarker, such as ADRs, such as the A2A (SEQ ID NO:534) and A2B (SEQ ID NO:535) adenosine receptors or CD39 (SEQ ID NO:542) and CD73 (SEQ ID NO:543) ectonucleotidases, in a cell or tissue sample. In such an example, if the level is indicative of disease, then the patient is diagnosed with a condition or disease associated with elevated adenosine levels. For example, a high percentage of staining indicates the subject has a tumor with elevated the adenosine-associated biomarker, such as ADRs, such as the A2A and A2B adenosine receptors or CD39 and CD73 ectonucleotidase, indicative of the presence of a tumor that would benefit from treatment with any ADA2 provided herein and thus is a candidate for treatment with any ADA2 provided herein. In other examples, a subject can be selected for treatment with any ADA2 provided herein, based on the percentage of staining, for example, if the degree of the adenosine-associated biomarker staining is 10%, 15%, 20%, 25%, 30%, 35%, 40%, 45%, 50%, 55%, 60%, 65%, 70%, 75%, 80%, 85%, 90%, 95% or more of the total staining area, and generally at least 25% or more. Using histochemical methods, the amount of the adenosine-associated biomarker detected is quantified and given as a percentage of the adenosine-associated biomarker positive pixels and/or a score. For example, the amount of the adenosine-associated biomarker detected in the sample can be quantified as a percentage of the adenosine-associated biomarker positive pixels. In some examples, the amount of the adenosine-associated biomarker present in a sample is quantified as the percentage of area stained, e.g., the percentage of the adenosine-associated biomarker positive pixels. For example, a sample can have at least or at least about or about 0, 1%, 2%, 3%, 4%, 5%, 6%, 7%, 8%, 9%, 10%, 11%, 12%, 13%, 14%, 15%, 16%, 17%, 18%, 19%, 20%, 21%, 22%, 23%, 24%, 25%, 26%, 27%, 28%, 29%, 30%, 31%, 32%, 33%, 34%, 35%, 40%, 45%, 50%, 55%, 60%, 65%, 70%, 75%, 80%, 85%, 90%, 95% or more of the adenosine-associated biomarker positive pixels as compared to the total staining area.

[0946] Efficacy of treatment with any ADA2 provided herein or responsiveness to treatment also can be monitored by comparing the level or amount of adenosine-associated biomarkers in a subject over time. Changes in the level or amount of adenosine-associated biomarkers can be used to optimize dosing or scheduling of treatment with any ADA2 provided herein. In the method, the level of adenosine-associated biomarkers in samples, from treated subjects, are compared to a predetermined level of adenosine-associated biomarkers.

[0947] For purposes of monitoring treatment, the predetermined level of the adenosine-associated biomarker can be from a normal or healthy subject, a baseline adenosine-associated biomarker value prior to treatment, the prior measured adenosine-associated biomarker level in the same subject at an earlier time after treatment, or a classification or stratification of the adenosine-associated biomarker levels known to be associated with disease progression or regression. For example, if the adenosine-associated biomarker level is about the same as or below (or decreased) as compared reference or control sample, the treatment is indicated to be efficacious and the treatment can be continued or discontinued or altered. For example, the predetermined level of the adenosine-associated biomarker can be an adenosine-associated biomarker level from a normal or healthy tissue sample, and if the level of the adenosine-associated biomarker measured in the subject after treatment is higher than the normal the adenosine-associated biomarker levels, then treatment is resumed or continued. For example, the predetermined level of the adenosine-associated biomarker can be the adenosine-associated biomarker levels as determined from a baseline adenosine-associated biomarker value prior to treatment, and the course of treatment determined accordingly. For example, if the level of the adenosine-associated biomarker is the same as baseline levels, then treatment is continued or resumed; if the level of the adenosine-associated biomarker is higher than baseline levels, then treatment is continued or resumed or treatment is accelerated or increased (e.g. by increasing the dosage of ADA2 or increasing the dose schedule in a dosage regimen cycle); if the level of the adenosine-associated biomarker is less than baseline levels, then treatment is continued or resumed, terminated or is reduced or decreased (e.g. by decreasing the dosage of ADA2 or decreasing the dose schedule in a dosage regimen cycle). In a further example, the predetermined level of the adenosine-associated biomarker can be an adenosine-associated biomarker level as determined in a prior measurement in an earlier course of treatment of the same subject. For example, if the level of the adenosine-associated biomarker is the same as the earlier measured levels, then treatment is continued or resumed; if the level of the adenosine-associated biomarker is higher than the earlier measured levels, then treatment is continued or resumed or treatment is accelerated or increased (e.g. by increasing the dosage of ADA2 or increasing the dose schedule in a dosage regimen cycle); if the level of the adenosine-associated biomarker is less than the earlier measured levels, then treatment is continued or resumed, terminated or is reduced or decreased (e.g. by decreasing the dosage of ADA2 or decreasing the dose schedule in a dosage regimen cycle).

[0948] In the monitoring methods or methods of determining efficacy of treatment, the particular therapy can be altered during the course of treatment to maximize individual response. Dosing and scheduling of treatment can be modified in response to changing levels. Combination therapy using other therapeutic agents, such as other anti-cancer agents, also can be employed in such treatment methods. It is within the level of the skill of the treating physician to determine the exact course of treatment. For example, the treatment can be altered, such that the dosing amount, schedule (e.g., frequency of administration), or regime is adjusted accordingly, such as discontinued, decreased or made less frequent, or combined with another treatment for the disease or condition. On the other hand, if the adenosine-associated biomarker level is above a compared reference or control sample, the patient is indicated to be not responding to the treatment. In such instances, the particular nature and type of the therapeutic agent, such as ADA2 or combination therapy can be modified or changed. In other instances, the dosing, amount, schedule and/or regime can be adjusted accordingly, such as increased or made more frequent. It is within the level of the treating physician to determine the exact course of treatment.

[0949] For purposes of monitoring efficacy of treatment, predetermined levels or amounts of the adenosine-associated biomarker can be empirically determined, whereby the level or amount indicates that the treatment is working. These predetermined values can be determined by comparison or knowledge of the adenosine-associated biomarker levels in a corresponding normal sample or samples of disease subjects as determined by the same assay of detection and using the same reagent. For example, high levels of the adenosine-associated biomarker as assessed by immunohistochemistry methods using a quantitative score scheme or percentage of tumor staining for the adenosine-associated biomarker of greater than 25% correlate to the existence of malignant disease across a range of cancer types, and indicate that a patient is not responding to treatment.

[0950] In the methods herein, the comparison to a predetermined level or to levels of a control or reference sample can be determined by any method known of skill in the art. For example, the comparison of the level of the adenosine-associated biomarker with a reference, control or predetermined level can be done by an automated system, such as software program or intelligence system that is part of, or compatible with, the equipment (e.g. computer platform) on which the assay is carried out. Alternatively, this comparison can be done by a physician or other trained or experienced professional or technician.

[0951] 3. Dosages and Administration

[0952] Any ADA2 provided herein, including wildtype, variants and modified forms thereof, can be formulated as pharmaceutical compositions for single dosage or multiple dosage administration. The ADA2 polypeptide is included in the composition in an amount sufficient to exert a therapeutically useful effect in the absence of undesirable side effects on the patient treated. The therapeutically effective concentration can be determined empirically by testing the polypeptides in known in vitro and in vivo systems such as by using the assays provided herein or known in the art (see e.g., Taliani et al. (1996) Anal. Biochem., 240: 60-67; Filocamo et al. (1997) J Virology, 71: 1417-1427; Sudo et al. (1996) Antiviral Res. 32: 9-18; Bouffard et al. (1995) Virology, 209:52-59; Bianchi et al. (1996) Anal. Biochem., 237: 239-244; Hamatake et al. (1996) Intervirology 39:249-258; Steinkuhler et al. (1998) Biochem., 37:8899-8905; D'Souza etal. (1995) J Gen. Virol., 76:1729-1736; Takeshita et al. (1997) Anal. Biochem., 247:242-246; see also e.g., Shimizu et al. (1994) J. Virol. 68:8406-8408; Mizutani et al. (1996) J. Virol. 70:7219-7223; Mizutani et al. (1996) Biochem. Biophys. Res. Commun., 227:822-826; Lu et al. (1996) Proc. Natl. Acad. Sci., 93:1412-1417; Hahm et al., (1996) Virology, 226:318-326; Ito et al. (1996) J. Gen. Virol., 77:1043-1054; Mizutani et al. (1995) Biochem. Biophys. Res. Commun., 212:906-911; Cho et al. (1997) J. Virol. Meth. 65:201-207) and then extrapolated therefrom for dosages for humans.

[0953] The amount of any ADA2 provided herein to be administered for the treatment of a disease or condition can be determined by standard clinical techniques. In addition, in vitro assays and animal models can be employed to help identify optimal dosage ranges. The precise dosage, which can be determined empirically, can depend on the particular agent, the route of administration, the type of disease to be treated and the seriousness of the disease. In some embodiments, the compositions administered can contain nucleic acids that encode the variant ADA2 polypeptide provided herein, such as oncolytic viral vectors or gene therapy vectors, or cells, such as modified immune cells for adoptive immunotherapy. Particular dosage can depend on the particular route of administration, the particular disease or condition, the severity of the disease or condition, the particular formulation and other factors within the level of a skilled artisan.

[0954] Hence, it is understood that the precise dosage and duration of treatment is a function of the disease being treated and can be determined empirically using known testing protocols or by extrapolation from in vivo or in vitro test data. It is to be noted that concentrations and dosage values also can vary with the severity of the condition to be alleviated. It is to be further understood that for any particular subject, specific dosage regimens should be adjusted over time according to the individual need and the professional judgment of the person administering or supervising the administration of the compositions, and that the concentration ranges set forth herein are exemplary only and are not intended to limit the scope or use of compositions and combinations containing them. The compositions can be administered hourly, daily, weekly, monthly, yearly or once. Generally, dosage regimens are chosen to limit toxicity. It should be noted that the attending physician would know how to and when to terminate, interrupt or adjust therapy to lower dosage due to toxicity, or bone marrow, liver or kidney or other tissue dysfunctions. Conversely, the attending physician would also know how to and when to adjust treatment to higher levels if the clinical response is not adequate (precluding toxic side effects).

[0955] One of skill in the art can, in a clinical setting, determine the individual dosage of ADA2 provided herein for administration, depending on the clinical response of the tumor and the side effect profile of an individual subject, such as a human or an animal. For example, compositions of PEGylated ADA2 provided herein, can be formulated at 25 U/mL. If a 25 g mouse is injected with 0.2 mL of this formulation, this would translate into 200 U/kg body weight. One of skill in the art can determine the human equivalent dose (HED), based on body surface area, of approximately 16 U/kg body weight for humans. Appropriate HED can be calculated using body surface area or body weight-based conversion (Reagan-Shaw et al. (2008) The FASEB Journal 22(3):659-661).

[0956] The range of doses of any ADA2 provided herein can be from or from about 10 mU/kg body weight to about 50 U/kg body weight or higher. For example, a single dose can be 10 mU/kg body weight, 10 mU/kg, 20 mU/kg, 30 mU/kg, 40 mU/kg, 50 mU/kg, 60 mU/kg, 70 mU/kg, 80 mU/kg, 90 mU/kg, 100 mU/kg, 200 mU/kg, 300 mU/kg, 400 mU/kg, 500 mU/kg, 600 mU/kg, 700 mU/kg, 800 mU/kg, 900 mU/kg, 1 U/kg, 2 U/kg, 3 U/kg, 4 U/kg, 5 U/kg, 6 U/kg, 7 U/kg, 8 U/kg, 9 U/kg, 10 U/kg, 20 U/kg, 30 U/kg, 40 U/kg, or 50 U/kg body weight. In other examples, a single dose can be between or between about 10 mU/kg body weight and 50 U/kg body weight, 10 mU/kg and 40 U/kg, 10 mU/kg and 30 U/kg, 10 mU/kg and 20 U/kg, 10 mU/kg and 10 U/kg, 10 mU/kg and 9 U/kg, 10 mU/kg and 8 U/kg, 10 mU/kg and 7 U/kg, 10 mU/kg and 6 U/kg, 10 mU/kg and 5 U/kg, 10 mU/kg and 4 U/kg, 10 mU/kg and 3 U/kg, 10 mU/kg and 2 U/kg, 10 mU/kg and 1 U/kg, 10 mU/kg and 900 mU/kg, 10 mU/kg and 800 mU/kg, 10 mU/kg and 700 mU/kg, 10 mU/kg and 600 mU/kg, 10 mU/kg and 500 mU/kg, 10 mU/kg and 400 mU/kg, 10 mU/kg and 300 mU/kg, 10 mU/kg and 200 mU/kg, 10 mU/kg and 100 mU/kg, 100 mU/kg and 50 U/kg, 100 mU/kg and 40 U/kg, 100 mU/kg and 30 U/kg, 100 mU/kg and 20 U/kg, 100 mU/kg and 10 U/kg, 100 mU/kg and 9 U/kg, 100 mU/kg and 8 U/kg, 100 mU/kg and 7 U/kg, 100 mU/kg and 6 U/kg, 100 mU/kg and 5 U/kg, 100 mU/kg and 4 U/kg, 100 mU/kg and 3 U/kg, 100 mU/kg and 2 U/kg, 100 mU/kg and 1 U/kg, 100 mU/kg and 900 mU/kg, 100 mU/kg and 800 mU/kg, 100 mU/kg and 700 mU/kg, 100 mU/kg and 600 mU/kg, 100 mU/kg and 500 mU/kg, 100 mU/kg and 400 mU/kg, 100 mU/kg and 300 mU/kg, 100 mU/kg and 200 mU/kg, 500 mU/kg and 50 U/kg, 500 mU/kg and 40 U/kg, 500 mU/kg and 30 U/kg, 500 mU/kg and 20 U/kg, 500 mU/kg and 10 U/kg, 500 mU/kg and 9 U/kg, 500 mU/kg and 8 U/kg, 500 mU/kg and 7 U/kg, 500 mU/kg and 6 U/kg, 500 mU/kg and 5 U/kg, 500 mU/kg and 4 U/kg, 500 mU/kg and 3 U/kg, 500 mU/kg and 2 U/kg, 500 mU/kg and 1 U/kg, 500 mU/kg and 900 mU/kg, 500 mU/kg and 800 mU/kg, 500 mU/kg and 700 mU/kg, 500 mU/kg and 600 mU/kg, 1 U/kg and 50 U/kg, 1 U/kg and 40 U/kg, 1 U/kg and 30 U/kg, 1 U/kg and 20 U/kg, 1 U/kg and 10 U/kg, 1 U/kg and 9 U/kg, 1 U/kg and 8 U/kg, 1 U/kg and 7 U/kg, 1 U/kg and 6 U/kg, 1 U/kg and 5 U/kg, 1 U/kg and 4 U/kg, 1 U/kg and 3 U/kg, 1 U/kg and 2 U/kg, 5 U/kg and 50 U/kg, 5 U/kg and 40 U/kg, 5 U/kg and 30 U/kg, 5 U/kg and 20 U/kg, 5 U/kg and 10 U/kg, 5 U/kg and 9 U/kg, 5 U/kg and 8 U/kg, 5 U/kg and 7 U/kg, 5 U/kg and 6 U/kg, 10 U/kg and 50 U/kg, 10 U/kg and 40 U/kg, 10 U/kg and 30 U/kg, and 10 U/kg body weight and 20 U/kg body weight.

[0957] In another example, the range of doses of any ADA2 provided herein can be between or between about 0.1 mg/kg body weight and 50 mg/kg body weight, 0.1 mg/kg and 40 mg/kg, 0.1 mg/kg and 30 mg/kg, 0.1 mg/kg and 20 mg/kg, 0.1 mg/kg and 10 mg/kg, 0.1 mg/kg and 9 mg/kg, 0.1 mg/kg and 8 mg/kg, 0.1 mg/kg and 7 mg/kg, 0.1 mg/kg and 6 mg/kg, 0.1 mg/kg and 5 mg/kg, 0.1 mg/kg and 4 mg/kg, 0.1 mg/kg and 3 mg/kg, 0.1 mg/kg and 2 mg/kg, 0.1 mg/kg and 1 mg/kg, 0.1 mg/kg and 0.9 mg/kg, 0.1 mg/kg and 0.8 mg/kg, 0.1 mg/kg and 0.7 mg/kg, 0.1 mg/kg and 0.6 mg/kg, 0.1 mg/kg and 0.5 mg/kg, 0.1 mg/kg and 0.4 mg/kg, 0.1 mg/kg and 0.3 mg/kg, 0.1 mg/kg and 0.2 mg/kg, 0.5 mg/kg and 50 mg/kg, 0.5 mg/kg and 40 mg/kg, 0.5 mg/kg and 30 mg/kg, 0.5 mg/kg and 20 mg/kg, 0.5 mg/kg and 10 mg/kg, 0.5 mg/kg and 9 mg/kg, 0.5 mg/kg and 8 mg/kg, 0.5 mg/kg and 7 mg/kg, 0.5 mg/kg and 6 mg/kg, 0.5 mg/kg and 5 mg/kg, 0.5 mg/kg and 4 mg/kg, 0.5 mg/kg and 3 mg/kg, 0.5 mg/kg and 2 mg/kg, 0.5 mg/kg and 1 mg/kg, 0.5 mg/kg and 0.9 mg/kg, 0.5 mg/kg and 0.8 mg/kg, 0.5 mg/kg and 0.7 mg/kg, 0.5 mg/kg and 0.6 mg/kg, 1 mg/kg and 50 mg/kg, 1 mg/kg and 40 mg/kg, 1 mg/kg and 30 mg/kg, 1 mg/kg and 20 mg/kg, 1 mg/kg and 10 mg/kg, 1 mg/kg and 9 mg/kg, 1 mg/kg and 8 mg/kg, 1 mg/kg and 7 mg/kg, 1 mg/kg and 6 mg/kg, 1 mg/kg and 5 mg/kg, 1 mg/kg and 4 mg/kg, 1 mg/kg and 3 mg/kg, 1 mg/kg and 2 mg/kg, 2 mg/kg and 50 mg/kg, 2 mg/kg and 40 mg/kg, 2 mg/kg and 30 mg/kg, 2 mg/kg and 20 mg/kg, 2 mg/kg and 10 mg/kg, 2 mg/kg and 9 mg/kg, 2 mg/kg and 8 mg/kg, 2 mg/kg and 7 mg/kg, 2 mg/kg and 6 mg/kg, 2 mg/kg and 5 mg/kg, 2 mg/kg and 4 mg/kg, 2 mg/kg and 3 mg/kg, 5 mg/kg and 50 mg/kg, 5 mg/kg and 40 mg/kg, 5 mg/kg and 30 mg/kg, 5 mg/kg and 20 mg/kg, 5 mg/kg and 10 mg/kg, 5 mg/kg and 9 mg/kg, 5 mg/kg and 8 mg/kg, 5 mg/kg and 7 mg/kg, 5 mg/kg and 6 mg/kg, 10 mg/kg and 50 mg/kg, 10 mg/kg and 40 mg/kg, 10 mg/kg and 30 mg/kg, 10 mg/kg and 20 mg/kg, 20 mg/kg and 50 mg/kg, 20 mg/kg and 40 mg/kg, 20 mg/kg and 30 mg/kg, 30 mg/kg and 50 mg/kg, 30 mg/kg and 40 mg/kg, and 40 mg/kg body weight and 50 mg/kg body weight. The dose can be administered a single time, or a multiple times. Appropriate dose amount can be determined by one of skill in the art, based on the regimen of administration. Total dose over a specific period of time can also be selected by one of skill in the art.

[0958] The optimal dose range for administration of compositions containing any ADA2 provided herein, including wildtype, variants and modified forms thereof, can be adjusted by plasma monitoring. The dose of administration can be such that the subject will maintain plasma ADA activity in the range of from about 10 to 1,000 mM/hr, and demonstrate a decline in erythrocyte adenosine, i.e., dATP less than or equal to about 0.001 to about 0.057 mM, for example, about 0.005 to about 0.015 mM in packed erythrocytes, or less than or equal to about 1% of the total erythrocyte adenosine (i.e., ATP+dATP content), of the normal adenosine level, as measured in a pre-administration sample. The normal value of dATP is less than about 0.001 mM.

[0959] Accordingly, the method provided herein includes a method of treating a tumor comprising administering an effective amount of ADA2 to the subject. An effective amount is readily determined by one of skill in the art to reduce tissue levels of adenosine or deoxyadenosine in the subject, and wherein growth or spread of the tumor is inhibited by substantially reduced tissue levels of adenosine in the subject. Also provided herein are methods to assess the level of adenosine-associated biomarkers in a subject to select a subject for treatment with any ADA2 provided herein. Doses or treatment regimen can be varied or adjusted based on the susceptibility of the patient to the treatment, as determined by one of skill in the art using the methods provided herein.

[0960] When ADA2 provided herein is co-formulated or co-administered with another therapeutic agent, such as an immune checkpoint inhibitor agent, a hyaluronan-degrading enzyme or an antitumor agent, dosages can be provided as a ratio of the amount of the ADA2 polypeptide to the amount of the other therapeutic agent administered. For example, an ADA2 polypeptide can be administered at 1 U ADA:1 U other therapeutic agent (1:1) to 50:1 or more, for example, at or about 1:1, 2:1, 3:1, 4:1, 5:1, 6:1, 7:1, 8:1, 9:1, 10:1, 11:1, 12:1, 13:1, 14:1, 15:1, 20:1, 25:1, 30:1, 35:1, 40:1, 45:1, 50:1 or more. In other examples, an ADA2 polypeptide can be administered at 1 U ADA:1 U other therapeutic agent (1:1) to 1:50 or less, for example, at or about 1:2, 1:3, 1:4, 1:5, 1:6, 1:7, 1:8, 1:9, 1:10, 1:11, 1:12, 1:13, 1:14, 1:15, 1:20, 1:25, 1:30, 1:35, 1:40, 1:45, 1:50 or less.

[0961] 4. Combination Therapies

[0962] In the methods provided herein, ADA2 provided herein, including wildtype, variants and modified forms thereof, can be administered before, after, or concomitantly with one or more other therapeutic regimens or agents. The skilled medical practitioner can determine empirically, or by considering the pharmacokinetics and modes of action of the agents, the appropriate dose or doses of each therapeutic regimen or agent, as well as the appropriate timings and methods of administration. The additional therapeutic regimes or agents can improve the efficacy or safety of the ADA2 provided herein. In some examples, the additional therapeutic regimes or agents can treat the same disease or a comorbidity rather than to alter the action of the ADA2 provided herein. In some examples, the additional therapeutic regimes or agents can ameliorate, reduce or eliminate one or more side effects that are associated with administration of any ADA2 provided herein.

[0963] For example, an ADA2 described herein can be administered with chemotherapy, radiation therapy, or both chemotherapy and radiation therapy. Any ADA2 provided herein, including wildtype, variants and modified forms thereof can be administered in combination with one or more other prophylactic or therapeutic agents, including but not limited to antibodies, cytotoxic agents, chemotherapeutic agents, cytokines, growth inhibitory agents, anti-hormonal agents, kinase inhibitors, anti-angiogenic agents, cardioprotectants, immunostimulatory agents, immunosuppressive agents, immune checkpoint inhibitors, antibiotics, angiogenesis inhibitors, or other therapeutic agents. The other therapeutic agent used in combination with the treatment using ADA2 provided herein, can be, for example, a protein, a peptide, a nucleic acid, a small molecule agent, a toxin, a lipid, a carbohydrate or combinations thereof, or any other type of therapeutic agent. In other examples, the additional therapeutic regime can be radiation therapy.

[0964] The one or more additional agents can be administered simultaneously, sequentially or intermittently with any of the ADA2 provided herein thereof. The agents can be co-administered with the ADA2 thereof, for example, as part of the same pharmaceutical composition or same method of delivery. In some examples, the agents can be co-administered with the ADA2 provided herein at the same time as the ADA2 thereof, but by a different means of delivery. The agents also can be administered at a different time than administration of the ADA2 thereof, but close enough in time to the administration of the ADA2 to have a combined prophylactic or therapeutic effect. In some examples, the one or more additional agents are administered subsequent to or prior to the administration of the ADA2 provided herein, separated by a selected time period. In some examples, the time period is 1 day, 2 days, 3 days, 4 days, 5 days, 6 days, 1 week, 2 weeks, 3 weeks, 1 month, 2 months, or 3 months. In some examples, the one or more additional agents are administered multiple times and/or the ADA2 provided herein is administered multiple times. In other examples, the ADA2 variants provided herein and the one or more additional agents that are proteins, can be encoded in one or more expression vectors for in vivo expression, particularly, tumor targeted or oncolytic vectors for expression in tumor cells. In yet another example, the ADA2 variant provided herein and the one or more additional agents that are proteins, can be expressed in modified immune cells, and the modified immune cells can be administered for adoptive immunotherapy which can target and deliver ADA2 and additional agent(s) to tumor cells in particular.

[0965] a. Anticancer Agents

[0966] The method of treatment using ADA2 provided herein can be administered in combination with one or more anticancer agents known in the art. The combination treatment of the present invention includes administering ADA2 with an effective amount of the anticancer agents described herein or known in the art, simultaneously or sequentially. The anticancer agent can be, for example, a chemotherapeutic, an antibody, a peptide, or a gene therapy vector, virus or DNA or combinations thereof.

[0967] Exemplary of anticancer agents for the combination treatment include, for example, Taxol™, bevacizumab (Avastin®), vincristine, vinblastine, neomycin, combretastatin(s), podophyllotoxin(s), TNF-α, angiostatin, endostatin, vasculostatin, αv-β3 antagonists, calcium ionophores, calcium-flux inducing agents, and any derivative or prodrug thereof. The anticancer agents for combination therapy also include chemotherapeutic agents, radiotherapeutic agents, cytokines, anti-angiogenic agents, apoptosis-inducing agents or anticancer immunotoxins or coaguligands, for example, Erbitux® (cetuximab). Exemplary chemotherapeutic agents include but are not limited to, 5-azacytidine, 5-fluorouracil, optionally in combination with leucovorin, 5-fluorodeoxyuridine, 6-mercaptopurine, 6-thioguanine, mitoxantrone, aziridinylbenzoquinone (AZQ), Carmustine (BCNU or BCNU; Bristol-Myers Squibb), bleomycin, carboplatin (CBDCA), Lomustine (CCNU), methyl-CCNU or MeCCNU, chlorambucil, chlorodeoxyadenosine, cisplatin, cyclophosphamide, cytarabine, dactinomycin, daunorubicin, deoxycoformycin, doxorubicin, doxycoformycin, DTIC (dacarbazine), epirubicin, etoposide (VP-16), fludarabine, hexamethylmelamine, hydroxyurea, idarubicin, ifosfamide, ifosfamide and mesna, levamisol, N-acetylcysteine (NAC), 1-phenylalanine mustard, 4′-(9-acridinylamino)methanesulfon-m-anisidide (mAMSA), inhibitors of multiple drug resistance (i.e., MDR inhibitors), melphalan, methotrexate, optionally in combination with leucovorin, mithramycin, mitomycin-c, inhibitors of multidrug resistance related protein (“MRP” inhibitors), paclitaxel, procarbazine, streptozotocin, N,N′N′-triethylenethiophosphoramide (“thioTEPA”), inhibitors of topoisomerase I and/or topoisomerase II, taxol, vinblastine, vincristein, vincristine, vindesine, and teniposide (VM-26®).

[0968] Other exemplary anti-cancer agents that can be administered after, coincident with or before administration of any ADA2 provided herein, including wildtype, variants and modified forms thereof, include, but are not limited to Acivicins; Aclarubicins; Acodazoles; Acronines; Adozelesins; Aldesleukins; Alemtuzumabs; Alitretinoins (9-Cis-Retinoic Acids); Allopurinols; Altretamines; Alvocidibs; Ambazones; Ambomycins; Ametantrones; Amifostines; Aminoglutethimides; Amsacrines; Anastrozoles; Anaxirones; Ancitabines; Anthramycins; Apaziquones; Argimesnas; Arsenic Trioxides; Asparaginases; Asperlins; Atrimustines; Azacitidines; Azetepas; Azotomycins; Banoxantrones; Batabulins; Batimastats; BCG Live; Benaxibines; Bendamustines; Benzodepas; Bexarotenes; Bevacizumab; Bicalutamides; Bietaserpines; Biricodars; Bisantrenes; Bisantrenes; Bisnafide Dimesylates; Bizelesins; Bleomycins; Bortezomibs; Brequinars; Bropirimines; Budotitanes; Busulfans; Cactinomycins; Calusterones; Canertinibs; Capecitabines; Caracemides; Carbetimers; Carboplatins; Carboquones; Carmofurs; Carmustines with Polifeprosans; Carmustines; Carubicins; Carzelesins; Cedefingols; Celecoxibs; Cemadotins; Chlorambucils; Cioteronels; Ciplactin; Cirolemycins; Cisplatins; Cladribines; Clanfenurs; Clofarabines; Crisnatols; Cyclophosphamides; Cytarabine liposomals; Cytarabines; Dacarbazines; Dactinomycins; Darbepoetin Alfas; Daunorubicin liposomals; Daunorubicins/Daunomycins; Daunorubicins; Decitabines; Denileukin Diftitoxes; Dexniguldipines; Dexonas; Dexrazoxanes; Dezaguanines; Diaziquones; Dibrospidiums; Dienogests; Dinalins; Disermolides; Docetaxels; Dofequidars; Doxifluridines; Doxorubicin liposomals; Doxorubicin HCL; Doxorubicin HCL liposome injection; Doxorubicins; Droloxifenes; Dromostanolone Propionates; Duazomycins; Ecomustines; Edatrexates; Edotecarins; Eflornithines; Elacridars; Elinafides; Elliott's B Solutions; Elsamitrucins; Emitefurs; Enloplatins; Enpromates; Enzastaurins; Epipropidines; Epirubicins; Epoetin alfas; Eptaloprosts; Erbulozoles; Esorubicins; Estramustines; Etanidazoles; Etoglucids; Etoposide phosphates; Etoposide VP-16s; Etoposides; Etoprines; Exemestanes; Exisulinds; Fadrozoles; Fazarabines; Fenretinides; Filgrastims; Floxuridines; Fludarabines; Fluorouracils; 5-fluorouracils; Fluoxymesterones; Flurocitabines; Fosquidones; Fostriecins; Fostriecins; Fotretamines; Fulvestrants; Galarubicins; Galocitabines; Gemcitabines; Gemtuzumabs/Ozogamicins; Geroquinols; Gimatecans; Gimeracils; Gloxazones; Glufosfamides; Goserelin acetates; Hydroxyureas; Ibritumomabs/Tiuxetans; Idarubicins; Ifosfamides; Ilmofosines; Ilomastats; Imatinib mesylates; Imexons; Improsulfans; Indisulams; Inproquones; Interferon alfa-2as; Interferon alfa-2bs; Interferon Alfas; Interferon Betas; Interferon Gammas; Interferons; Interleukin-2s and other Interleukins (including recombinant Interleukins); Intoplicines; Iobenguanes [131-I]; Iproplatins; Irinotecans; Irsogladines; Ixabepilones; Ketotrexates; L-Alanosines; Lanreotides; Lapatinibs; Ledoxantrones; Letrozoles; Leucovorins; Leuprolides; Leuprorelins (Leuprolides); Levamisoles; Lexacalcitols; Liarozoles; Lobaplatins; Lometrexols; Lomustines/CCNUs; Lomustines; Lonafamibs; Losoxantrones; Lurtotecans; Mafosfamides; Mannosulfans; Marimastats; Masoprocols; Maytansines; Mechlorethamines; Mechlorethamines/Nitrogen mustards; Megestrol acetates; Megestrols; Melengestrols; Melphalans; Melphalan L-PAMs; Menogarils; Mepitiostanes; Mercaptopurines; 6-Mecaptopurine; Mesnas; Metesinds; Methotrexates; Methoxsalens; Metomidates; Metoprines; Meturedepas; Miboplatins; Miproxifenes; Misonidazoles; Mitindomides; Mitocarcins; Mitocromins; Mitoflaxones; Mitogillins; Mitoguazones; Mitomalcins; Mitomycin Cs; Mitomycins; Mitonafides; Mitoquidones; Mitospers; Mitotanes; Mitoxantrones; Mitozolomides; Mivobulins; Mizoribines; Mofarotenes; Mopidamols; Mubritinibs; Mycophenolic Acids; Nandrolone Phenpropionates; Nedaplatins; Nelarabines; Nemorubicins; Nitracrines; Nocodazoles; Nofetumomabs; Nogalamycins; Nolatrexeds; Nortopixantrones; Octreotides; Oprelvekins; Ormaplatins; Ortataxels; Oteracils; Oxaliplatins; Oxisurans; Oxophenarsines; Paclitaxels; Pamidronates; Patupilones; Pegademases; Pegaspargases; Pegfilgrastims; Peldesines; Peliomycins; Pelitrexols; Pemetrexeds; Pentamustines; Pentostatins; Peplomycins; Perfosfamides; Perifosines; Picoplatins; Pinafides; Pipobromans; Piposulfans; Pirfenidones; Piroxantrones; Pixantrones; Plevitrexeds; Plicamycin Mithramycins; Plicamycins; Plomestanes; Plomestanes; Porfimer sodiums; Porfimers; Porfiromycins; Prednimustines; Procarbazines; Propamidines; Prospidiums; Pumitepas; Puromycins; Pyrazofurins; Quinacrines; Ranimustines; Rasburicases; Riboprines; Ritrosulfans; Rituximabs; Rogletimides; Roquinimexs; Rufocromomycins; Sabarubicins; Safingols; Sargramostims; Satraplatins; Sebriplatins; Semustines; Simtrazenes; Sizofirans; Sobuzoxanes; Sorafenibs; Sparfosates; Sparfosic Acids; Sparsomycins; Spirogermaniums; Spiromustines; Spiroplatins; Spiroplatins; Squalamines; Streptonigrins; Streptovarycins; Streptozocins; Sufosfamides; Sulofenurs; Sunitinib Malate; 6-TG; Tacedinalines; Tales; Talisomycins; Tallimustines; Tamoxifens; Tariquidars; Tauromustines; Tecogalans; Tegafurs; Teloxantrones; Temoporfins; Temozolomides; Teniposides/VM-26s; Teniposides; Teroxirones; Testolactones; Thiamiprines; Thioguanines; Thiotepas; Tiamiprines; Tiazofurins; Tilomisoles; Tilorones; Timcodars; Timonacics; Tirapazamines; Topixantrones; Topotecans; Toremifenes; Tositumomabs; Trabectedins (Ecteinascidin 743); Trastuzumabs; Trestolones; Tretinoins/ATRA; Triciribines; Trilostanes; Trimetrexates; Triplatin Tetranitrates; Triptorelins; Trofosfamides; Tubulozoles; Ubenimexs; Uracil Mustards; Uredepas; Valrubicins; Valspodars; Vapreotides; Verteporfins; Vinblastines; Vincristines; Vindesines; Vinepidines; Vinflunines; Vinformides; Vinglycinates; Vinleucinols; Vinleurosines; Vinorelbines; Vinrosidines; Vintriptols; Vinzolidines; Vorozoles; Xanthomycin A's (Guamecyclines); Zeniplatins; Zilascorbs [2-H]; Zinostatins; Zoledronate; Zorubicins; and Zosuquidars; Aldesleukins (e.g., PROLEUKIN®); Alemtuzumabs (e.g., CAMPATH®); Alitretinoins (e.g., PANRETIN®); Allopurinols (e.g., ZYLOPRIM®); Altretamines (e.g., HEXALEN®); Amifostines (e.g., ETHYOL®); Anastrozoles (e.g., ARIMIDEX®); Arsenic Trioxides (e.g., TRISENOX®); Asparaginases (e.g., ELSPAR®); BCG Live (e.g., TICE@ BCG); Bexarotenes (e.g., TARGRETIN®); Bevacizumab (AVASTIN®); Bleomycins (e.g., BLENOXANE®); Busulfan intravenous (e.g., BUSULFEX®); Busulfan orals (e.g., MYLERAN™); Calusterones (e.g., METHOSARB®); Capecitabines (e.g., XELODA®); Carboplatins (e.g., PARAPLATIN®); Carmustines (e.g., BCNU®, BiCNU®); Carmustines with Polifeprosans (e.g., GLIADEL® Wafer); Celecoxibs (e.g., CELEBREX®); Chlorambucils (e.g., LEUKERAN®); Cisplatins (e.g., PLATINOL®); Cladribines (e.g., LEUSTATIN®, 2-CdA®); Cyclophosphamides (e.g., CYTOXAN®, NEOSAR®); Cytarabines (e.g., CYTOSAR-U®); Cytarabine liposomals (e.g., DepoCyt®); Dacarbazines (e.g., DTIC-Domeo): Dactinomycins (e.g., COSMEGEN®); Darbepoetin Alfas (e.g., ARANESP®); Daunorubicin liposomals (e. g. DAUNOXOME®); Daunorubicins/Daunomycins (e.g., CERUBIDINE®); Denileukin Diftitoxes (e.g., ONTAK®); Dexrazoxanes (e.g., ZINECARD®); Docetaxels (e.g., TAXOTERE®); Doxorubicins (e.g., ADRIAMYCIN®, RUBEX®); Doxorubicin liposomals, including Doxorubicin HCL liposome injections (e.g., DOXIL®); Dromostanolone propionates (e.g., DROMOSTANOLONE® and MASTERONE® Injection); Elliott's B Solutions (e.g., Elliott's B Solution®); Epirubicins (e.g., ELLENCE®); Epoetin alfas (e.g., EPOGEN®); Estramustines (e.g., EMCYT®); Etoposide phosphates (e.g., ETOPOPHOS®); Etoposide VP-16s (e.g., VEPESID®); Exemestanes (e.g., AROMASIN®); Filgrastims (e.g., NEUPOGEN®); Floxuridines (e.g., FUDR®); Fludarabines (e.g., FLUDARA®); Fluorouracils incl. 5-FUs (e.g., ADRUCIL®); Fulvestrants (e.g., FASLODEX®); Gemcitabines (e.g., GEMZAR®); Gemtuzumabs/Ozogamicins (e.g., MYLOTARG®); Goserelin acetates (e.g., ZOLADEX®); Hydroxyureas (e.g., HYDREA®); Ibritumomabs/Tiuxetans (e.g., ZEVALIN®); Idarubicins (e.g., IDAMYCIN®); Ifosfamides (e.g., IFEX®); Imatinib mesylates (e.g., GLEEVEC®); Interferon alfa-2as (e.g., ROFERON-A®); Interferon alfa-2bs (e.g., INTRON A®); Irinotecans (e.g., CAMPTOSAR®); Letrozoles (e.g., FEMARA®); Leucovorins (e.g., WELLCOVORIN®, LEUCOVORIN®); Levamisoles (e.g., ERGAMISOL®); Lomustines/CCNUs (e.g., CeeNU®); Mechlorethamines/Nitrogen mustards (e.g., MUSTARGEN®); Megestrol acetates (e.g., MEGACE®); Melphalans/L-PAMs (e.g., ALKERAN@); Mercaptopurine incl. 6-MPs (e.g., PURINETHOL®); Mesnas (e.g., MESNEX®); Methotrexates; Methoxsalens (e.g., UVADEX®); Mitomycin Cs (e.g., MUTAMYCIN®, MITOZYTREX®); Mitotanes (e.g., LYSODREN®); Mitoxantrones (e.g., NOVANTRONE®); Nandrolone Phenpropionates (e.g., DURABOLIN-50®); Nofetumomabs (e.g., VERLUMA®); Oprelvekins (e.g., NEUMEGA®); Oxaliplatins (e.g., ELOXATIN®); Paclitaxels (e.g., PAXENE®, TAXOL®); Pamidronates (e.g., AREDIA®); Pegademases (e.g., ADAGEN®); Pegaspargases (e.g., ONCASPAR®); Pegfilgrastims (e.g., NEULASTA®); Pentostatins (e.g., NIPENT®); Pipobromans (e.g., VERCYTE®); Plicamycin/Mithramycins (e.g., MITHRACIN®); Porfimer sodiums (e.g., PHOTOFRIN®); Procarbazines (e.g., MATULANE®); Quinacrines (e.g., ATABRINE®); Rasburicases (e.g., ELITEK®); Rituximabs (e.g., RITUXAN®); Sargramostims (e.g., PROKINE®); Streptozocins (e.g., ZANOSAR®); Sunitinib Malates (e.g., SUTENT®); Tales (e.g., SCLEROSOL®); Tamoxifens (e.g., NOLVADEX®); Temozolomides (e.g., TEMODAR®); Teniposides/VM-26s (e.g., VUMON®); Testolactones (e.g., TESLAC®); Thioguanines incl. 6-TG; Thiotepas (e.g., THIOPLEX®); Topotecans (e.g., HYCAMTIN®); Toremifenes (e.g., FARESTON@); Tositumomabs (e.g., BEXXAR®); Trastuzumabs (e.g., HERCEPTIN®); Tretinoins/ATRA (e.g., VESANOID®); Uracil Mustards; Valrubicins (e.g., VALSTAR®); Vinblastines (e.g., VELBAN®); Vincristines (e.g., ONCOVIN®); Vinorelbines (e.g., NAVELBINE®); and Zoledronates (e.g., ZOMETA®). Any ADA2 provided herein can be used in combination therapy with other anticancer agents, such as those provided herein and/or those described in Goodman and Gilman's The Pharmacological Basis of Therapeutics, Eds. Hardman and Limbird, Tenth edition (2002).

[0969] i. Anticancer Antibodies

[0970] Examples of anti-cancer antibodies that can be co-administered with any ADA2 provided herein include, but are not limited to, anti 17-IA cell surface antigen antibodies such as Panorex® (edrecolomab); anti-4-1BB antibodies; anti-4Dc antibodies; anti-A33 antibodies such as A33 and CDP-833; anti-α1 integrin antibodies such as natalizumab; anti-α4β7 integrin antibodies such as LDP-02; anti-αVβ1 integrin antibodies such as F-200, M-200, and SJ-749; anti-αVβ3 integrin antibodies such as abciximab, CNTO-95, Mab-17E6, and Vitaxin®; anti-complement factor 5 (C5) antibodies such as 5G1.1; anti-CA125 antibodies such as OvaRex® (oregovomab); anti-CD3 antibodies such as Nuvion® (visilizumab) and Rexomab; anti-CD4 antibodies such as IDEC-151, MDX-CD4, OKT4A; anti-CD6 antibodies such as Oncolysin B and Oncolysin CD6; anti-CD7 antibodies such as HB2; anti-CD19 antibodies such as B43, MT-103, and Oncolysin B; anti-CD20 antibodies such as 2H7, 2H7.v16, 2H7.v114, 2H7.v115, Bexxar® (tositumomab), Rituxan® (rituximab), and Zevalin® (Ibritumomab tiuxetan); anti-CD22 antibodies such as Lymphocide® (epratuzumab); anti-CD23 antibodies such as IDEC-152; anti-CD25 antibodies such as basiliximab and Zenapax® (daclizumab); anti-CD30 antibodies such as AC10, MDX-060, and SGN-30; anti-CD33 antibodies such as Mylotarg® (gemtuzumab ozogamicin), Oncolysin M, and Smart Ml 95; anti-CD38 antibodies; anti-CD40 antibodies such as SGN-40 and toralizumab; anti-CD40L antibodies such as 5c8, Antova®, and IDEC-131; anti-CD44 antibodies such as bivatuzumab; anti-CD46 antibodies; anti-CD52 antibodies such as Campath® (alemtuzumab); anti-CD55 antibodies such as SC-1; anti-CD56 antibodies such as huN901-DM1; anti-CD64 antibodies such as MDX-33; anti-CD66e antibodies such as XR-303; anti-CD74 antibodies such as IMMU-1 10; anti-CD80 antibodies such as galiximab and IDEC-1 14; anti-CD89 antibodies such as MDX-214; anti-CD123 antibodies; anti-CD138 antibodies such as B-B4-DM1; anti-CD146 antibodies such as AA-98; anti-CD148 antibodies; anti-CEA antibodies such as cT84.66, labetuzumab, and Pentacea®; anti-CTLA4 antibodies such as MDX-101; anti-CXCR4 antibodies; anti-EGFR antibodies such as ABX-EGF, Erbitux® (cetuximab), IMC-C225, and Merck Mab 425; anti-EpCAM antibodies such as Crucell's anti-EpCAM, ING-1, and IS-IL-2; anti-ephrin B2/EphB4 antibodies; anti-Her2 antibodies such as Herceptin®), MDX-210; anti-FAP (fibroblast activation protein) antibodies such as sibrotuzumab; anti-ferritin antibodies such as NXT-211; anti-FGF-1 antibodies; anti-FGF-3 antibodies; anti-FGF-8 antibodies; anti-FGFR antibodies, anti-fibrin antibodies; anti-G250 antibodies such as WX-G250 and Rencarex®; anti-GD2 ganglioside antibodies such as EMD-273063 and TriGem; anti-GD3 ganglioside antibodies such as BEC2, KW-2871, and mitumomab; anti-gpIIb/IIIa antibodies such as ReoPro; anti-heparinase antibodies; anti-Her2/ErbB2 antibodies such as Herceptin® (trastuzumab), MDX-210, and pertuzumab; anti-HLA antibodies such as Oncolym®, Smart 1D10; anti-HM1.24 antibodies; anti-ICAM antibodies such as ICM3; anti-IgA receptor antibodies; anti-IGF-1 antibodies such as CP-751871 and EM-164; anti-IGF-1R antibodies such as IMC-A12; anti-IL-6 antibodies such as CNTO-328 and elsilimomab; anti-IL-15 antibodies such as HuMax®-IL15; anti-KDR antibodies; anti-laminin 5 antibodies; anti-Lewis Y antigen antibodies such as Hu3S193 and IGN-311; anti-MCAM antibodies; anti-Mudl antibodies such as BravaRex and TriAb; anti-NCAM antibodies such as ERIC-I and ICRT; anti-PEM antigen antibodies such as Theragyn and Therex; anti-PSA antibodies; anti-PSCA antibodies such as IG8; anti-Ptk antibodies; anti-PTN antibodies; anti-RANKL antibodies such as AMG-162; anti-RLIP76 antibodies; anti-SK-1 antigen antibodies such as Monopharm C; anti-STEAP antibodies; anti-TAG72 antibodies such as CC49-SCA and MDX-220; anti-TGF-β antibodies such as CAT-152; anti-TNF-α antibodies such as CDP571, CDP870, D2E7, Humira® (adalimumab), and Remicade® (infliximab); anti-TRAIL-RI and TRAIL-R2 antibodies; anti-VE-cadherin-2 antibodies; and anti-VLA-4 antibodies such as Antegren®. Furthermore, anti-idiotype antibodies including but not limited to the GD3 epitope antibody BEC2 and the gp72 epitope antibody 105AD7, can be used. In addition, bispecific antibodies including but not limited to the anti-CD3/CD20 antibody Bi20 can be used.

[0971] ii. Chemotherapeutic Agents

[0972] In some examples, any ADA2 provided herein, including wildtype, variants and modified forms thereof, is administered with one or more chemotherapeutic agents. Examples of chemotherapeutic agents include but are not limited to alkylating agents such as thiotepa and cyclophosphamide (CYTOXAN®); alkyl sulfonates such as busulfan, improsulfan and piposulfan; androgens such as calusterone, dromostanolone propionate, epitiostanol, mepitiostane, testolactone; anti-adrenals such as aminoglutethimide, mitotane, trilostane; anti-androgens such as flutamide, nilutamide, bicalutamide, leuprolide, and goserelin; antibiotics such as aclacinomycins, actinomycin, anthramycin, azaserine, bleomycins, cactinomycin, calicheamicin, carubicin, carminomycin, carzinophilin, chromomycins, dactinomycin, daunorubicin, detorubicin, 6-diazo-5-oxo-L-norleucine, doxorubicin, epirubicin, esorubicin, idarubicin, marcellomycin, mitomycins, mycophenolic acid, nogalamycin, olivomycins, peplomycin, porfiromycin, puromycin, quelamycin, rodorubicin, streptonigrin, streptozocin, tubercidin, ubenimex, zinostatin, zorubicin; anti estrogens including for example tamoxifen, raloxifene, aromatase inhibiting 4(5)-imidazoles, 4-hydroxytamoxifen, trioxifene, keoxifene, LY 117018, onapristone, and toremifene (Fareston); anti-metabolites such as methotrexate and 5-fluorouracil (5-FU); folic acid analogues such as denopterin, methotrexate, pteropterin, trimetrexate; aziridines such as benzodepa, carboquone, meturedepa, and uredepa; ethylenimines and methylmelamines including altretamine, triethylenemelamine, triethylenephosphoramide, triethylenethiophosphoramide and trimethylol melamine; folic acid replenisher such as folinic acid; nitrogen mustards such as chlorambucil, chlornaphazine, chlorophosphamide, estramustine, ifosfamide, mechlorethamine, mechlorethamine oxide hydrochloride, melphalan, novembichin, phenesterine, prednimustine, trofosfamide, uracil mustard; nitrosoureas such as carmustine, chlorozotocin, fotemustine, lomustine, nimustine, ranimustine; platinum analogs such as cisplatin and carboplatin; vinblastine; platinum; proteins such as arginine deiminase and asparaginase; purine analogs such as fludarabine, 6-mercaptopurine, thiamiprine, thioguanine; pyrimidine analogs such as ancitabine, azacitidine, 6-azauridine, carmofur, cytarabine, dideoxyuridine, doxifluridine, enocitabine, floxuridine, 5-FU; taxanes, e.g. paclitaxel (TAXOL®, Bristol-Myers Squibb Oncology, Princeton, N.J.) and docetaxel (TAXOTERE®), Rhone-Poulenc Rorer, Antony, France); topoisomerase inhibitor RFS 2000; thymidylate synthase inhibitor (such as Tomudex); additional chemotherapeutics including aceglatone; aldophosphamide glycoside; aminolevulinic acid; amsacrine; bestrabucil; bisantrene; edatrexate; defosfamide; demecolcine; diaziquone; difluoromethylomithine (DMFO); eflomithine; elliptinium acetate; etoglucid; gallium nitrate; hydroxyurea; lentinan; lonidamine; mitoguazone; mitoxantrone; mopidamol; nitracrine; pentostatin; phenamet; pirarubicin; podophyllinic acid; 2-ethylhydrazide; procarbazine; PSK®; razoxane; sizofiran; spirogermanium; tenuazonic acid; triaziquone; 2,2′, 2″-trichlorotriethylamine; urethan; vindesine; dacarbazine; mannomustine; mitobronitol; mitolactol; pipobroman; gacytosine; arabinoside (“Ara-C”); cyclophosphamide; thiotepa; chlorambucil; gemcitabine; 6-thioguanine; mercaptopurine; methotrexate; etoposide (VP-16); ifosfamide; mitomycin C; mitoxantrone; vincristine; vinorelbine; Navelbine; Novantrone; teniposide; daunomycin; aminopterin; Xeloda; ibandronate; CPT-11; retinoic acid; esperamycins; capecitabine; and topoisomerase inhibitors such as irinotecan. Pharmaceutically acceptable salts, acids or derivatives of any of the above can also be used.

[0973] A chemotherapeutic agent can be administered as a prodrug. Examples of prodrugs that can be administered with any ADA2 provided herein include, but are not limited to, phosphate-containing prodrugs, thiophosphate-containing prodrugs, sulfate-containing prodrugs, peptide-containing prodrugs, D-amino acid-modified prodrugs, glycosylated prodrugs, beta-lactam-containing prodrugs, optionally substituted phenoxy acetamide-containing prodrugs or optionally substituted phenylacetamide-containing prodrugs, 5-fluorocytosine and other 5-fluorouridine prodrugs which can be converted into the more active cytotoxic free drug.

[0974] iii. Radiation Therapy

[0975] Any ADA2 provided herein, including wildtype, variants and modified forms thereof, can be combined with other therapeutic regimens. For example, in one embodiment, the patient to be treated with any ADA2 provided herein can receive radiation therapy. Radiation therapy can be administered according to protocols commonly employed in the art and known to the skilled artisan. Such therapy includes but is not limited to cesium, iridium, iodine, cobalt radiation, irradiation with X-rays, gamma rays, including both direct irradiation and with tomographic targeting, treatment of cancerous tissues with implanted radioactive pellets or “seeds,” neutron beam irradiation of tissues primed with boron compounds, and/or other types of particle beam therapy known in the art. The radiation therapy can be whole body irradiation, or can be directed locally to a specific site or tissue in or on the body, such as the lung, bladder, or prostate. Typically, radiation therapy is administered in pulses over a period of time from about 1 to 2 weeks. The radiation therapy can, however, be administered over longer periods of time. For instance, radiation therapy can be administered to patients having head and neck cancer for about 6 to about 7 weeks. Optionally, the radiation therapy can be administered as a single dose or as multiple, sequential doses. The skilled medical practitioner can determine empirically the appropriate dose or doses of radiation therapy useful herein. In some examples, any ADA2 provided herein, including wildtype, variants and modified forms thereof and optionally one or more other anti-cancer therapies are employed to treat cancer cells ex vivo. It is contemplated that such ex vivo treatment can be useful in bone marrow transplantation and particularly, autologous bone marrow transplantation. For instance, treatment of cells or tissue(s) containing cancer cells with any ADA2 provided herein and one or more anti-cancer therapies can be employed to deplete or substantially deplete the cancer cells prior to transplantation in a recipient patient. Radiation therapy can also comprise treatment with an isotopically labeled molecule, such as an antibody. Examples of radioimmunotherapeutics include but Zevalin® (Y—90 labeled anti-CD20), LymphoCide® (Y-90 labeled anti-CD22) and Bexxar® (1-131 labeled anti-CD20). In addition, it is contemplated that any ADA2 provided herein, including wildtype, variants and modified forms thereof, can be administered to a patient or subject in combination with still other therapeutic techniques such as surgery or phototherapy.

[0976] iv. Anti-angiogenic Agents

[0977] In some examples, any ADA2 provided herein, including wildtype, variants and modified forms thereof, is administered with one or more anti-angiogenic agents. For example, the anti-angiogenic factor can be a small molecule or a protein (e.g., an antibody, Fc fusion, or cytokine) that binds to a growth factor or growth factor receptor involved in promoting angiogenesis. Examples of anti-angiogenic agents include but are not limited to antibodies that bind to Vascular Endothelial Growth Factor (VEGF) or that bind to VEGF-R, RNA-based therapeutics that reduce levels of VEGF or VEGF-R expression, VEGF-toxin fusions, Regeneron's VEGF-trap, angiostatin (plasminogen fragment), antithrombin III, angiozyme, ABT-627, Bay 12-9566, BeneFin, bevacizumab, bisphosphonates, BMS-275291, cartilage-derived inhibitor (CDI), CAI, CD59 complement fragment, CEP-7055, Col 3, Combretastatin A-4, endostatin (collagen XVIII fragment), farnesyl transferase inhibitors, fibronectin fragment, gro-beta, halofuginone, heparinases, heparin hexasaccharide fragment, HMV833, human chorionic gonadotropin (hCG), IM-862, interferon alpha, interferon beta, interferon gamma, interferon inducible protein 10 (IP-10), interleukin-12, kringle 5 (plasminogen fragment), marimastat, metalloproteinase inhibitors (e.g. TIMPs), 2-methoxyestradiol, MMI 270 (CGS 27023A), plasminogen activator inhibitor (PAI), platelet factor-4 (PF4), prinomastat, prolactin 16 kDa fragment, proliferin-related protein (PRP), PTK 787/ZK 222594, retinoids, solimastat, squalamine, SS3304, SU5416, SU6668, SU11248, tetrahydrocortisol-S, tetrathiomolybdate, thalidomide, thrombospondin-1 (TSP-1), TNP470, transforming growth factor beta (TGF-0), vasculostatin, vasostatin (calreticulin fragment), ZS6126, and ZD6474.

[0978] v. Immune Checkpoint Inhibitors

[0979] In some examples, any ADA2 provided herein, including wildtype, variants and modified forms thereof, is administered with one or more agents that increases the immune response by blocking an immune checkpoint protein (i.e., immune checkpoint inhibitor). In the combination therapies provided herein, the immune checkpoint inhibitor can be an antibody directed against an immune checkpoint protein, such as an antibody directed against cytotoxic T-lymphocyte antigen 4 (CTLA4 or CD152), programmed cell death protein 1 (PD-1), or programmed cell death protein 1 ligand 1 (PD-L1).

[0980] In particular, the combination therapy provided herein is applicable to treating all types of tumors, including cancers, that are associated with elevated adenosine levels and/or susceptible to a reduction in adenosine or deoxyadenosine levels in the subject to be treated. Broadly, these include tumors of the blood as well as solid tumors. Exemplary cancers include, but are not limited to, those that originate in the immune system, skeletal system, muscles and heart, breast, gastrointestinal tract, central and peripheral nervous system, renal system, reproductive system, respiratory system, skin, connective tissue systems, including joints, fatty tissues, and circulatory system, including blood vessel walls.

[0981] Therapies for treating cancers include immunotherapies (e.g., inhibitory checkpoint protein antagonists or agonists) that inhibit immunosuppressive signaling or enhance immunostimulant signaling. Instead of directly targeting the tumor itself, such therapies use the host's endogenous defenses to combat the tumor. For example, inhibitory checkpoint protein antagonists and/or agonists of co-stimulatory receptors can stimulate a host's endogenous anti-tumor immune response by amplifying antigen-specific T cell responses. Enhancing the host's immune response offers the advantage over cytotoxic therapies in that the effects can be long lasting, such that the subject can develop a durable anti-tumor response that can persist for months to years after cessation of treatment.

[0982] In particular examples, the combination therapies provided herein employ an agent (e.g., antibody) that targets an inhibitory checkpoint protein. Exemplary inhibitory immune checkpoint target proteins and therapeutic antibodies for the targets are provided in Table 5.

TABLE 5
Exemplary inhibitory immune checkpoint target proteins and inhibitors

| | | Antibody/fusion | |
|---|---|---|---|
| Target | Target Function | protein | Synonyms and Code Names |
| CTLA4 | Inhibitory receptor | Ipilimumab | (MDX-CTLA4; BMS-734016; |
| | | Tremelimumab | MDX-010) |
| | | | (ticilimumab; CP-675,206) |
| PD-1 | Inhibitory receptor | MK-3475 | (Pembrolizumab; Lambrolizumab; |
| | | AMP-224 | SCH 900475) |
| | | Nivolumab | (anti-PD-1 fusion protein |
| | | Pidilizumab | AMP-224) (BMS-936558; MDX-1106; |
| | | | ONO-4538) |
| | | | (CT-011) |
| PD-L1 | Ligand for PD-1 | MDX-1105 | (RG7446) |
| | | BMS-936559 | |
| | | MED14736 | |
| | | MPDL33280A | |
| LAG3 | Inhibitory receptor | IMP321 | ImmuFact |
| B7-H3 | Inhibitory ligand | MGA271 | |
| B7-H4 | Inhibitory ligand | | |
| TIM3 | Inhibitory receptor | | |
| CD25 | inhibitory receptor | | |
| | subunit | | |
| CD137 | stimulatory receptor | | |
| OX40 | stimulatory receptor | | |
| 4-1BB | co-stimulatory | Aptamer | |
| | receptor | ligand | |
| IDO | immunosuppressive | | |
| | enzyme | | |

[0983] In particular, inhibitors of the immunologic inhibitory molecules CTLA4, PD-1 and PD-L1 are contemplated for the combinations and methods provided herein. While both CTLA4 and PD-1 function as negative regulators, each places a non-redundant role in modulating immune responses: CTLA4 is involved in attenuating the early activation of naïve and memory (resting) T cells, whereas PD-1 plays a role in modulating T cell activity in peripheral tissues (see, e.g., Keir et al. (2008) Annu Rev Immunol. 26:677-704; Pardoll, (2012) Nat Rev Cancer. 12(4):252-264; Quezada et al., (20i3) Br J Cancer. 108(8):1i560-1565; Callahan et al., (20i0) Semin Oncol. 37(5):473-84).

[0984] Cytotoxic T-lymphocyte-associated antigen 4 (CTLA4; also called CD152; SEQ ID NO:544) is a co-inhibitory receptor that is packaged in vesicles that are maintained in the cytoplasm of naïve or resting T cells. When T cell activation is initiated, transportation of the vesicles containing CTLA4 to the surface of the T cell is also triggered. The inhibitory activity of CTLA4 acts to dampen the amplitude of the stimulatory signals. In this role, CTLA4 functions to reduce T-cell activity and thereby limit autoimmunity. CTLA4 also plays a role in down-modulation of helper T cell activity and in enhancing regulatory T (T_{reg}) cell activity. Inhibition of CTLA4, for example by administering anti-CTLA4 antibodies, can enhance the immune response by increasing the activity of CTLs, increasing the presence of effector and helper T cells and/or by inhibiting the suppressive functions of T_{reg} cells. Inhibition of CTLA4 allows full activation of the T cells during the priming phase of the immune response.

[0985] Upon T cell activation and entry into the bloodstream, expression of programmed cell death protein 1 (PD-1; SEQ ID NO:545), a receptor that inhibits T cell activation, is induced. PD-1 also is present on regulatory T (T_{reg}) cells, exhausted T cells, activated B cells, natural killer (NK) cells, dendritic cells (DCs) and activated monocytes. PD-1 has two principal ligands, PD-1 ligand 1 (PD-L1; also called B7-H1 or CD274; SEQ ID NO:546) and PD-L2 (also called B7-DC or CD273). Inflammatory signals in tissues induce the expression of PD-L1 and PD-L2. Upon binding one of its ligands, PD-1 acts to attenuate T cell activity, by inhibiting signaling of the T cell receptor (TCR), downregulation the secretion of immunostimulatory cytokines and expression of survival proteins, and increasing T cell production of the immunosuppressive cytokine IL-10. These activities serve to limit collateral tissue damage and limit autoimmunity during an immune response under normal conditions. Blocking the PD-1 signaling pathway, for example by administering anti-PD-1 or anti-PD-L1 antibodies, results in restoration of T cell effector functions, such as tumor-specific T cell effector functions, such as killing tumor cells and secretion of immunostimulatory cytokines, such as interferon gamma (IFN-γ), interleukin-2 (IL-2) and tumor necrosis factor alpha (TNF-α).

[0986] Other immune checkpoint ligands and receptors are involved in modulating the immune response and can be targets for therapies aimed at enhancing antitumor immunity. Further, blockade of two or more of coordinately expressed receptors or ligands can produce additive or synergistic antitumor activities. Targets include B7 inhibitory ligands, other than PD-L1 an PD-L2, such B7-H3 and B7-H4, which are upregulated on tumor cells or tumor infiltrating cells. Other targets, which are associated with inhibition of lymphocyte activity, include lymphocyte activation gene 3 (LAG3; also called CD223), 2B4 (also called CD244), B and T lymphocyte attenuator (BTLA; or CD272), T cell membrane protein 3 (TIM3; or HAVcr2), Adenosine A2a receptor (A2aR), and the family of killer inhibitory receptors. Many of these immune checkpoint receptors regulate the activity of effector T cells and T_{reg}cells. For example, LAG3 is highly expressed on T_{reg} cells (which help prevent autoimmunity), where it is thought to be important for amplifying immunosuppressive activity. LAG3 also is associated with inhibition of effector T-cell activity and can induce T-cell anergy (Pardoll, (2012) Nat Rev Cancer. 12(4):252-264. Antibody targeting of these proteins alone or in combination can enhance antitumor immunity in animal cancer models. Because many tumor cells express multiple inhibitory ligands, and tumor infiltrating lymphocytes express multiple inhibitory receptors, a combinatorial approach to inhibiting these proteins can be effective in enhancing antitumor immunity (see Pardoll, (2012) Nat Rev Cancer. 12(4):252-264 for a review). In addition to secreted or membrane-bound inhibitory ligands, metabolic enzymes such as indoleamine 2,3 dioxygenase (IDO) and arginase, which are expressed by inhibitory myeloid-derived suppressor cells that commonly infiltrate tumors, can locally inhibit immune responses by depleting amino acids essential for anabolic metabolism of T cells. These enzymes can be inhibited by small molecule drugs.

[0987] Since immune checkpoint inhibitors act on immune cells to enhance immune responses, the increased response when provided in combination with any ADA2 provided herein, including wildtype, variants and modified forms thereof, can be due to effects on increasing access of immune cells (e.g., CTLs) to the tumor. For example, as described above, tumor and stromal cells produce a high level of adenosine, which can exert immunosuppressive effects. By reducing the adenosine-mediated immunosuppression, there can be an increased activity of circulating immune cells against the tumors, thereby increasing the number of cytotoxic and other immune cells available to kill tumor cells. The efficacy of anti-tumor agents or drugs, such as immune checkpoint inhibitors (e.g., anti-CTLA4 antibody), can also be increased.

[0988] Hence, the use of any ADA2 provided herein, including wildtype, variants and modified forms thereof, for example, PEGylated ADA2), can sensitize a tumor to immune-mediated responses, which can be further increased in the presence of an immune checkpoint inhibitor (e.g., anti-CTLA4 antibody, and anti-PD1 antibody or an anti-PD-L1 antibody). Enhancing the activity of immune cells against the tumor, i.e. reducing the effect of adenosine-mediated immunosuppression, by any ADA2 provided herein, can allow for reduced dosage of the immune checkpoint inhibitor, while maintaining or enhancing therapeutic efficacy. The ability to more effectively fine tune the antibody dosage can result in a reduction in adverse events that can be associated with the antibody therapy. Thus, the combination therapy provided herein can facilitate an enhanced anti-tumor immune response for the eradication of tumors and tumor treatment.

[0989] The combination therapy, including compositions, combinations and methods and use thereof, provided herein contains inhibitors of immune checkpoint proteins that block an immune checkpoint protein to stimulate an anti-tumor immune response. Such immune checkpoint inhibitors are known in the art. Examples of such inhibitors are provided herein, and include any inhibitory agent that targets an inhibitory checkpoint protein described in Table 5. For example, the immune checkpoint inhibitor or inhibitory agent is an inhibitor of CTLA4, PD-1 and PD-L1. In particular examples, the immune checkpoint inhibitor is an antibody or an aptamer. Exemplary inhibitors of CTLA4, PD-1 and PD-L1 include anti-CTLA4, anti-PD-1 and anti-PD-L1 antibodies and aptamers.

[0990] An inhibitor that is an aptamer can be employed in the combination therapy provided herein. An aptamer includes oligonucleotide (DNA, RNA, or XNA) or peptide aptamers. An aptamer can be monovalent or multivalent, such as bivalent or tetravalent. In some cases, the aptamer can be modified by polymers, such as cholesterol or polyethylene glycol (PEG) to extend the half-life of circulating aptamers.

[0991] In particular examples, the immune checkpoint inhibitor is an antibody that blocks an immune checkpoint molecule (e.g. anti-CTLA4, anti-PD-1 and anti-PD-L1). The antibody can be a full-length antibody or an antigen-binding fragment thereof that immunospecifically binds to the immune checkpoint molecule (e.g., CTLA4, PD-1 and PD-L1). Other immunomodulatory agents which are contemplated for use in the combinations, methods, and uses provided herein include inhibitory agents targeted against the inhibitory receptors lymphocyte-activation gene 3 (LAG3) and T cell membrane protein 3 (TIM3), inhibitory ligands such as PD-L2 (or B7-H2), B7-H3, B7-H4, and CD25, and the immunosuppressive enzyme Indoleamine 2,3-dioxygenase (IDO). Agents directed against LAG3 (e.g., fusion protein IMP321 and multiple mAbs) and anti B7-H3 antibodies (e.g., MGA271) have been characterized and are in use in clinical trials. Antibodies or inhibitory agents of B7-H4 and TIM3 are in preclinical development (Pardoll, Nat Rev Cancer. 2012 Mar. 22; 12(4):252-264). Any one of more of these agents can be included in any of the combinations provided herein. In addition, variants and modified forms of the antibodies can also be used in the method of combination therapy provided herein.

[0992] (a) Anti-CTLA-4 Therapies

[0993] Two antibodies that block CTLA4, Ipilimumab and Tremelimumab, have been used for the effective treatment of some cancers, such as melanoma, pancreatic cancer, ovarian cancer, prostate cancer, renal cell cancer (RCC), colorectal cancer (CRC), gastric cancer, and NSCLC (see Kyi et al., (2014) FEBS Letters 588:368-376 for a review). Therapeutic CTLA4 blockade can effect tumor regression months to years after completion of therapy (Prieto et al., (2012) Clin Cancer Res. 18(7):2039-2047; Kirkwood et al., (2010) Clin Cancer Res. 16(3):1042-1048), but also can reduce tolerance to other host tissues, leading to adverse events, such as immune-related adverse events (irAEs).

[0994] The combination therapies provided herein, including compositions and methods and uses thereof, can include therapeutic agents that inhibit CTLA4. Inhibitors include antibodies and aptamers. Antibody and aptamer inhibitors that bind to CTLA4 and inhibit CTLA4 signaling are known. Exemplary aptamers which bind CTLA4, inhibit CTLA4 function, and enhance tumor immunity have been described and are set forth in SEQ ID NOS:384-388, 539-541 (Santulli-Marotto (2003) Cancer Res. 63(21):7483-7489; Gilboa et al., (2013) Clin Cancer Res 19(5):1054-1062).

[0995] Several antibodies, which bind and inhibit CTLA4 activity, have been described which have been used in anti-tumor immunotherapy. Anti-CTLA4 antibodies include, but are not limited to, any of those described in U.S. Pat. Nos. 6,682,736, 6,984,720; U.S. Publ. Nos. 2002/0086014; 2009/0074787; EP 1262193; and WO 2000/037504. In particular, anti-CTLA4 antibodies include Ipilimumab (also called MDX-010, MDX-101, 10D1; Drug Bank Accession No. DB06186) and Tremelimumab (also called Ticilimumab, CP-675,206 or 11.2.1).

[0996] For example, an anti-CTLA4 antibody for use in the combination therapy provided herein can include Ipilimumab (also called MDX-010, MDX-101, 10D1; Drug Bank Accession No. DB06186) or derivatives thereof, such as variants or antigen-binding fragments of Ipilimumab. Ipilimumab is a fully human IgG1× monoclonal antibody that specifically binds human CTLA4 (see, e.g., antibody designated 10D1 in US Patent Publication No. 2002/0086014 and U.S. Pat. No. 6,984,720). The heavy chain of Ipilimumab has a variable domain (V_{H}) with the sequence of amino acids set forth in SEQ ID NO:390, encoded by the sequence of nucleotides set forth in SEQ ID NO:389. The complementarity determining regions (CDRs) of the heavy chain include V_{H} CDR 1 (set forth in SEQ ID NO:393); V_{H} CDR 2 (set forth in SEQ ID NO:394); and V_{H} CDR 3 (set forth in SEQ ID NO:395). The light chain of Ipilimumab has a variable domain (V_{L}) with the sequence of amino acids set forth in SEQ ID NO:392, encoded by the sequence of nucleotides set forth in SEQ ID NO:391. The CDRs of the light chain include, V_{L} CDR 1 (set forth in SEQ ID NO:396); V_{L} CDR 2 (set forth in SEQ ID NO:397); and V_{L} CDR 3 (set forth in SEQ ID NO:398). When recombinantly produced, Ipilimumab is made up of four polypeptide chains; two identical heavy chains of 447 amino acids each and two identical kappa light chains of 215 amino acids each. Each heavy and light chain pair is linked through an interchain disulfide bond.

[0997] In another example, an anti-CTLA4 antibody for use in the combination therapy provided herein can include Tremelimumab (also called Ticilimumab, CP-675,206 or 11.2.1) or derivatives thereof, such as variants or antigen-binding fragments of Tremelimumab. Tremelimumab is a fully human IgG2 monoclonal antibody that specifically binds human CTLA4 (see e.g., antibody designated 11.2.1 of WO 00/37504). The heavy chain of Tremelimumab has a variable domain (V_{H}) with the sequence of amino acids set forth in SEQ ID NO:400, encoded by the sequence of nucleotides set forth in SEQ ID NO:399. The complementarity determining regions (CDRs) of the heavy chain include V_{H} CDR 1 (set forth in SEQ ID NO:471); V_{H} CDR 2 (set forth in SEQ ID NO:472); and V_{H} CDR 3 (set forth in SEQ ID NO:473). The light chain of Tremelimumab has a variable domain (V_{L}) with the sequence of amino acids set forth in SEQ ID NO:402, encoded by the sequence of nucleotides set forth in SEQ ID NO:401. The CDRs of the light chain include, V_{L} CDR 1 (set forth in SEQ ID NO:474); V_{L} CDR 2 (set forth in SEQ ID NO:475); and V_{L} CDR 3 (set forth in SEQ ID NO:476). When recombinantly produced, Tremelimumab is made up of four polypeptide chains; two identical heavy chains and two identical kappa light chains. Each heavy and light chain pair is linked through an interchain disulfide bond.

[0998] These anti-CTLA4 antibodies have been involved in numerous clinical trials for the treatment of cancers. Ipilimumab is FDA approved for the treatment of melanoma and has been in clinical trials for other cancers, such as prostate cancer, lung cancer, and RCC. Tremelimumab has been investigated in clinical trials for the treatment of CRC, gastric cancer, melanoma and NSCLC.

[0999] The anti-CTLA4 antibodies in the combination therapy provided herein also can include variants of Ipilimumab or Tremelimumab, or antigen-binding fragments thereof that include the variations, where the variant antibody immunospecifically binds CTLA4. The variations can be, for example, amino acid replacements, insertion or deletion of amino acids.

[1000] (b) Anti-PD-1 and Anti-PD-L1 Therapies

[1001] The combination therapies provided herein, including compositions and methods and uses thereof, include therapeutic agents that inhibit PD-1 or PD-L1. Inhibitors that include antibodies and fusion proteins, aptamers, Antibody, aptamer and fusion protein inhibitors that bind to PD-1 or PD-L1 and inhibit PD-1 inhibitory signaling are known. Exemplary fusion proteins include AMP-224 (also known as B7-DCIg), which is a PD-L2-Fc fusion soluble receptor described in WO2010/027827 and WO2011/066342.

[1002] Several antibodies, which bind PD-1 or PD-L1 and inhibit PD-1-inhibitory activity, have been described which have been used in anti-tumor immunotherapy. Anti-PD-1 antibodies include, but are not limited to, any of those described in U.S. Pat. Nos. 7,943,743, 8,008,449, 8,779,105, 8,735,553; U.S. Publication Nos. 2005/0180969 2007/0166281; and International Patent Pub. No. WO 2008/156712. Anti-PD-L1 antibodies include, but are not limited to, any of those described in U.S. Publ. Nos. 2013/0034559 and 2013/0045202; U.S. Pat. Nos. 7,943,743, 8,217,149, 8,679,767, and 8,779,108; and Intl. Publ. Nos. WO 2010/077634 and WO 2013/019906.

[1003] In particular, anti-PD-1 antibodies include Nivolumab (also known as BMS-936558, MDX-1106, ONO-4538 or 5C4), MK-3475 (also known as Pembrolizumab, Lambrolizumab or h409A11), Pidilizumab (also known as hBAT-1 or CT-011), and AMP-224 (also known as B7-DCIg). These anti-PD-1 antibodies have been involved in numerous clinical trials for the treatment of cancers, such as melanoma, NSCLC, RCC, hematologic malignancies, lymphomas, leukemias, pancreatic cancer, prostate cancer, lung cancer, and multiple myeloma.

[1004] For example, an anti-PD-1 antibody for use in the combination therapy provided herein can include Nivolumab (also known as BMS-936558, MDX-1106, ONO-4538 or 5C4) or derivatives thereof, such as variants or antigen-binding fragments of Nivolumab.

[1005] Nivolumab is a fully human IgG4 monoclonal antibody that specifically binds human PD-1 (see, e.g., antibody designated 5C4 in U.S. Pat. No. 8,008,449). The heavy chain of Nivolumab has a variable domain (VH) with the sequence of amino acids set forth in SEQ ID NO:404, encoded by the sequence of nucleotides set forth in SEQ ID NO:403. The complementarity determining regions (CDRs) of the heavy chain include VH CDR 1 (set forth in SEQ ID NO:407); VH CDR 2 (set forth in SEQ ID NO:408); and VH CDR 3 (set forth in SEQ ID NO:409). The light chain of Nivolumab has a variable domain (VL) with the sequence of amino acids set forth in SEQ ID NO:406, encoded by the sequence of nucleotides set forth in SEQ ID NO:405. The CDRs of the light chain include, VL CDR 1 (set forth in SEQ ID NO:410); VL CDR 2 (set forth in SEQ ID NO:411); and VL CDR 3 (set forth in SEQ ID NO:412). When recombinantly produced, Nivolumab is made up of four polypeptide chains; two identical heavy chains and two identical kappa light chains. Each heavy and light chain pair is linked through an interchain disulfide bond.

[1006] In another example, an anti-PD-1 antibody for use in the combination therapy provided herein can include MK-3475 (also called Pembrolizumab, Lambrolizumab or h409A11) or derivatives thereof, such as variants or antigen-binding fragments of MK-3475. MK-3475 is a humanized IgG4κ monoclonal antibody that specifically binds human PD-1 (see, e.g., antibody designated h409A11 in WO 2008/156712). The complete heavy chain of MK-3475 has the sequence of amino acids set forth in SEQ ID NO:414, encoded by a sequence of nucleotides set forth in SEQ ID NO:413, and the complete light chain has the sequence of amino acids set forth in SEQ ID NO:416, encoded by a sequence of nucleotides set forth in SEQ ID NO:415. The heavy chain is composed of a variable domain (VH), with an amino acid sequence set forth in SEQ ID NO:418, encoded by a sequence of nucleotides set forth in SEQ ID NO:417). The light chain is composed of a variable domain (VL) with an amino acid sequence set forth in SEQ ID NO:420, encoded by a sequence of nucleic acids set forth in SEQ ID NO:419) and a humanized kappa light constant region. When recombinantly produced, MK-3475 is made up of four polypeptide chains; two identical heavy chains of 447 amino acids each and two identical kappa light chains of 218 amino acids each. Each heavy and light chain pair is linked through an interchain disulfide bond.

[1007] The CDRs of MK-3475 include, VH CDR 1 (SEQ ID NO:421); VH CDR 2 (SEQ ID NO:422); VH CDR 3 (SEQ ID NO:423); VL CDR 1 (SEQ ID NO:424); VL CDR 2 (SEQ ID NO:425); and VL CDR 3 (SEQ ID NO:426).

[1008] In another example, an anti-PD-1 antibody for use in the combination therapy provided herein can include Pidilizumab (also called hBAT-1 or CT-011) or derivatives thereof, such as variants or antigen-binding fragments of Pidilizumab. Pidilizumab is a humanized IgG1 monoclonal antibody that was generated from a murine antibody (BAT), which was raised against B lymphoid cell membranes, and has been shown to elicit T-cell- and NK-cell-based activities. Pidilizumab binds human PD-1 (see, e.g., antibody designated BAT-1 RκD/RHC in US 2005/0180969). The complete heavy chain of Pidilizumab has the sequence of amino acids set forth in SEQ ID NO:428, encoded by a sequence of nucleotides set forth in SEQ ID NO:427, and the complete light chain has the sequence of amino acids set forth in SEQ ID NO:430, encoded by a sequence of nucleotides set forth in SEQ ID NO:429. The heavy chain is composed of a variable domain (VH), with an amino acid sequence set forth in SEQ ID NO:432, encoded by a sequence of nucleotides set forth in SEQ ID NO:431. The light chain is composed of a variable domain (VL,) with an amino acid sequence set forth in SEQ ID NO:434, encoded by a sequence of nucleic acids set forth in SEQ ID NO:433, and a humanized kappa light constant region. When recombinantly produced, Pidilizumab is made up of four polypeptide chains; two identical heavy chains and two identical kappa light chains. Each heavy and light chain pair is linked through an interchain disulfide bond.

[1009] The CDRs of Pidilizumab include, VH CDR 1 (amino acid sequence set forth in SEQ ID NO:435); VH CDR 2 (amino acid sequence set forth in SEQ ID NO:436); VH CDR 3 (amino acid sequence set forth in SEQ ID NO:437); VL CDR 1 (amino acid sequence set forth in SEQ ID NO:438); VL CDR 2 (amino acid sequence set forth in SEQ ID NO:439); and VL CDR 3 (amino acid sequence set forth in SEQ ID NO:440).

[1010] The anti-PD-1 antibodies in the combination therapy provided herein also can include variants of Nivolumab, MK-3475, Pidilizumab, and AMP-224, or antigen-binding fragments thereof that include the variations, where the variant antibody immunospecifically binds PD-1. The variations can be, for example, amino acid replacements, insertion or deletion of amino acids.

[1011] In particular, anti-PD-L1 (or anti-B7H1) antibodies include, but are not limited to, the antibodies called BMS-936559 (also known as MDX-1105 or 12A4), MPDL3280A (also known as RG7446), and MEDI4736. These anti-PD-L1 antibodies have been involved in numerous clinical trials for the treatment of cancers, such as melanoma, NSCLC, ovarian cancer, RCC, and lung cancer.

[1012] For example, an anti-PD-L1 antibody for use in the combination therapy provided herein can include BMS-936559 (also known as MDX-1105 or 12A4) or derivatives thereof, such as variants or antigen-binding fragments of BMS-936559. BMS-936559 is a fully human IgG4 monoclonal antibody that specifically binds human PD-L1 (see, e.g., antibody designated 12A4 in U.S. Pat. No. 7,943,743). The heavy chain of BMS-936559 has a variable domain (VH) with the sequence of amino acids set forth in SEQ ID NO:442, encoded by the sequence of nucleotides set forth in SEQ ID NO:441. The complementarity determining regions (CDRs) of the heavy chain include VH CDR 1 (set forth in SEQ ID NO:445); VH CDR 2 (set forth in SEQ ID NO:446); and VH CDR 3 (set forth in SEQ ID NO:447). The light chain of BMS-936559 has a variable domain (VL) with the sequence of amino acids set forth in SEQ ID NO:444, encoded by the sequence of nucleotides set forth in SEQ ID NO:443. The CDRs of the light chain include, VL CDR 1 (set forth in SEQ ID NO:448); VL CDR 2 (set forth in SEQ ID NO:449); and VL CDR 3 (set forth in SEQ ID NO:450). When recombinantly produced, BMS-936559 is made up of four polypeptide chains; two identical heavy chains and two identical kappa light chains. Each heavy and light chain pair is linked through an interchain disulfide bond.

[1013] In another example, an anti-PD-L1 antibody for use in the combination therapy provided herein can include MPDL3280A (also known as RG7446) or derivatives thereof, such as variants or antigen-binding fragments of MPDL3280A. MPDL3280A is a fully human IgG4 monoclonal antibody that specifically binds human PD-L1 (see, e.g., U.S. Pat. No. 8,217,149 and WO 2013/019906). MPDL3280A contains a heavy chain variable domain (VH) with the sequence of amino acids set forth in SEQ ID NO:463 and a light chain variable domain (VL) with the sequence of amino acids set forth in SEQ ID NO:464. The full-length antibody contains a heavy chain sequence of amino acids set forth in SEQ ID NO:477 or 479 and a light chain sequence of amino acids set forth in SEQ ID NO:478. The full-length antibody also is reported to contain a heavy chain sequence of amino acids set forth in SEQ ID NO:461 and light chain sequence set forth in SEQ ID NO:462 (see WO 2013019906). The complementarity determining regions (CDRs) of the heavy chain include VH CDR 1 (set forth in SEQ ID NO:465); VH CDR 2 (set forth in SEQ ID NO:466); and VH CDR 3 (set forth in SEQ ID NO:467). The CDRs of the light chain include, VL CDR 1 (set forth in SEQ ID NO:468); VL CDR 2 (set forth in SEQ ID NO:469); and VL CDR 3 (set forth in SEQ ID NO:470). When recombinantly produced, MPDL3280A is made up of four polypeptide chains; two identical heavy chains and two identical kappa light chains. Each heavy and light chain pair is linked through an interchain disulfide bond.

[1014] In another example, an anti-PD-L1 antibody for use in the combination therapy provided herein can include MEDI4736 or derivatives thereof, such as variants or antigen-binding fragments of MEDI4736. MEDI4736 is a fully human IgG1κ monoclonal antibody that specifically binds human PD-L1 (see, e.g., antibody designated 2.7A4OPT in U.S. Publ. No. 2013/0034559). The heavy chain of MEDI4736 has a variable domain (VH) with the sequence of amino acids set forth in SEQ ID NO:452, encoded by the sequence of nucleotides set forth in SEQ ID NO:451. The complementarity determining regions (CDRs) of the heavy chain include VH CDR 1 (set forth in SEQ ID NO:455); VH CDR 2 (set forth in SEQ ID NO:456); and VH CDR 3 (set forth in SEQ ID NO:457). The light chain of MED14736 has a variable domain (VL) with the sequence of amino acids set forth in SEQ ID NO:454, encoded by the sequence of nucleotides set forth in SEQ ID NO:453. The CDRs of the light chain include, VL CDR 1 (set forth in SEQ ID NO:458); VL CDR 2 (set forth in SEQ ID NO:459); and VL CDR 3 (set forth in SEQ ID NO:460). When recombinantly produced, MED14736 is made up of four polypeptide chains; two identical heavy chains and two identical kappa light chains. Each heavy and light chain pair is linked through an interchain disulfide bond.

[1015] The anti-PD-L1 antibodies in the combination therapy provided herein also can include variants of BMS-936559, MPDL3280A, and MEDI4736, or antigen-binding fragments thereof that include the variations, where the variant antibody immunospecifically binds PD-L1. The variations can be, for example, amino acid replacements, insertion or deletion of amino acids.

[1016] b. Other Immunomodulatory Agents

[1017] In some examples, any ADA2 provided herein, including wildtype, variants and modified forms thereof, is administered with one or more immunomodulatory agents. Such agents can increase or decrease production of one or more cytokines, up- or down-regulate self-antigen presentation, mask MHC antigens, or promote the proliferation, differentiation, migration, or activation state of one or more types of immune cells. Examples of immunomodulatory agents include but are not limited to non-steroidal anti-inflammatory drugs (NSAIDs) such as aspirin, ibuprofen, celecoxib, diclofenac, etodolac, fenoprofen, indomethacin, ketorolac, oxaprozin, nabumetone, sulindac, tolmetin, rofecoxib, naproxen, ketoprofen, and nabumetone; steroids (e.g. glucocorticoids, dexamethasone, cortisone, hydroxycortisone, methylprednisolone, prednisone, prednisolone, triamcinolone, azulfidine eicosanoids such as prostaglandins, thromboxanes, and leukotrienes; as well as topical steroids such as anthralin, calcipotriene, clobetasol, and tazarotene); cytokines such as TGFb, IFNa, IFNb, IFNg, IL-2, IL4, IL-10; cytokine, chemokine, or receptor antagonists including antibodies, soluble receptors, and receptor-Fc fusions against BAFF, B7, CCR2, CCR5, CD2, CD3, CD4, CD6, CD7, CD8, CD11, CD14, CD15, CD17, CD18, CD20, CD23, CD28, CD40, CD40L, CD44, CD45, CD52, CD64, CD80, CD86, CD147, CD152, complement factors (C5, D) CTLA4, eotaxin, Fas, ICAM, ICOS, IFNα, IFNβ, IFNγ, IFNAR, IgE, IL-1, IL-2, IL-2R, IL-4, IL-5R, IL-6, IL-8, IL-9 IL-12, IL-13, IL-13R1, IL-15, IL-18R, IL-23, integrins, LFA-1, LFA-3, MHC, selectins, TGFβ, TNFα, TNFβ, TNF-R1, T-cell receptor, including Enbrel® (etanercept), Humira® (adalimumab), and Remicade® (infliximab); heterologous anti-lymphocyte globulin; other immunomodulatory molecules such as 2-amino-6-aryl-5 substituted pyrimidines, anti-idiotypic antibodies for MHC binding peptides and MHC fragments, azathioprine, brequinar, Bromocryptine, cyclophosphamide, cyclosporine A, D-penicillamine, deoxyspergualin, FK506, glutaraldehyde, gold, hydroxychloroquine, leflunomide, malononitriloamides (e.g. leflunomide), methotrexate, minocycline, mizoribine, mycophenolate mofetil, rapamycin, and sulfasalazine.

[1018] In some examples, any ADA2 provided herein, including wildtype, variants and modified forms thereof, is administered with one or more cytokines. Examples of cytokines include but are not limited to lymphokines, monokines, and traditional polypeptide hormones. Included among the cytokines are growth hormone such as human growth hormone, N-methionyl human growth hormone, and bovine growth hormone; parathyroid hormone; thyroxine; insulin; proinsulin; relaxin; prorelaxin; glycoprotein hormones such as follicle stimulating hormone (FSH), thyroid stimulating hormone (TSH), and luteinizing hormone (LH); hepatic growth factor; fibroblast growth factor; prolactin; placental lactogen; tumor necrosis factor-alpha and -beta; Mullerian-inhibiting substance; mouse gonadotropin-associated peptide; inhibin; activin; vascular endothelial growth factor; integrin; thrombopoietin (TPO); nerve growth factors such as NGF-beta; platelet-growth factor; transforming growth factors (TGFs) such as TGF-alpha and TGF-beta; insulin-like growth factor-I and -II; erythropoietin (EPO); osteoinductive factors; interferons such as interferon-alpha, beta, and -gamma; colony stimulating factors (CSFs) such as macrophage-CSF (M-CSF); granulocyte-macrophage-CSF (GM-CSF); and granulocyte-CSF (G-CSF); interleukins (ILs) such as IL-1, IL-lalpha, IL-2, IL-3, IL-4, IL-5, IL-6, IL-7, IL-8, IL-9, IL-10, IL-11, IL-12; IL-15, a tumor necrosis factor such as TNF-alpha or TNF-beta; and other polypeptide factors including LIF and kit ligand (KL).

[1019] In addition to inhibitory antibodies that target and inhibit immune checkpoint proteins, agonistic antibodies, which are capable of stimulating an immune response by binding its target protein/receptor, are contemplated for use in the combinations, methods, and uses provided herein. For example, Urelumab (also known as BMS-663513 and anti-4-1BB) is an agonistic humanized monoclonal antibody targeting the CD137 co-receptor, that is a member of the tumor necrosis factor (TNF)/nerve growth factor (NGF) family of receptors and is expressed on dendritic cells, follicular dendritic cells, natural killer cells, granulocytes and cells of blood vessel walls at sites of inflammation, with immunostimulatory properties. Urelumab specifically binds to and activates CD137-expressing immune cells, stimulating an immune response, in particular a cytotoxic T cell response, which can be mounted against tumor cells when administered as a part of a combination therapy provided herein (see, e.g., Vinay et al., (2012) Mol Cancer Ther. 11(5):1062-1070). Other 4-1BB agonists also can be included in the combinations provided herein, such as any described by Snell et al. in Immunol Rev. 244:197-217 (2011). OX40 (also known as CD134) is another immunostimulatory receptor, of the TNF family, which can be targeted by incorporating OX40 agonists, such as those described by Weinberg et al. in Immunol Rev. 244(1):218-231 (2011), into the combinations provided herein. Aptamer ligands which bind and stimulate 4-1BB or OX40 signaling also have been described (Gilboa et al., Clin Cancer Res. 19(5):1054-1062) and are contemplated for inclusion in the combination therapies provided herein.

[1020] In some examples, any ADA2 provided herein, including wildtype, variants and modified forms thereof, is administered with one or more cytokines or other agents that stimulate cells of the immune system and enhance desired effector function. For example, agents that stimulate NK cells, including but not limited to IL-2 can be administered with an any ADA2 provided herein. In another embodiment, agents that stimulate macrophages, including but not limited to C5a, formyl peptides such as N-formyl-methionyl-leucyl-phenylalanine (Beigier-Bompadre et. al. (2003) Scand. J. Immunol. 57: 221-8), can be administered with any ADA2 provided herein. Also, agents that stimulate neutrophils, including but not limited to G-CSF and GM-CSF, can be administered with any ADA2 provided herein. Furthermore, agents that promote migration of such immunostimulatory cytokines can be administered with any ADA2 provided herein. Also additional agents including but not limited to interferon gamma, IL-3 and IL-7 can promote one or more effector functions. In some examples, any ADA2 provided herein is administered with one or more cytokines or other agents that inhibit effector cell function.

[1021] c. Hyaluronan-Degrading Enzyme

[1022] The combination therapy, including combinations and methods and use thereof, provided herein can contain, in addition to the ADA2 provided herein, an anti-hyaluronan agent, such as a soluble hyaluronan-degrading enzyme. Hyaluronan-degrading enzymes are enzymes that catalyze the hydrolysis of hyaluronan, and can temporarily degrade hyaluronan. Hyaluronan is a component of the extracellular matrix and a major constituent of the interstitial barrier. Hyaluronan degrading enzymes act to degrade hyaluronan by cleaving hyaluronan polymers, which are composed of repeating disaccharides units, D-glucuronic acid (GlcA) and N-acetyl-D-glucosamine (GlcNAc), linked together via alternating β-1→4 and β-1→3 glycosidic bonds. Hyaluronan chains can reach about 25,000 disaccharide repeats or more in length and polymers of hyaluronan can range in size from about 5,000 to 20,000,000 Da in vivo. By catalyzing the hydrolysis of hyaluronan, a major constituent of the interstitial barrier, hyaluronan degrading enzymes lower the viscosity of hyaluronan, thereby increasing tissue permeability. As such, hyaluronan degrading enzymes, such as hyaluronidases, have been used, for example, as spreading or dispersing agents in conjunction with other agents, drugs and proteins to enhance their dispersion and delivery.

[1023] Certain diseases also are associated with expression and/or production of hyaluronan, including inflammatory diseases and cancers. HA is linked to a variety of biological processes involved with progression of such diseases (see e.g. Itano et al. (2008) Semin Cancer Biol 18(4):268-274; Tammi et al. (2008) Semin Cancer Biol 18(4):288-295). For example, HA is linked to biological processes associated with tumor progression, including epithelial-mesenchymal transition, and the p53 tumor suppressor pathway. Also, HA is involved in increased water uptake and interstitial fluid pressure (IFP) in disease tissues, such as tumors, thereby resulting in compressed tumor vasculature. For example, at sites of inflammation or in a tumor focus, there is rapid accumulation of hyaluronan, other matrix components and water. Because of this rapid accumulation, the diseased site cannot come to equilibrium with its environment and therefore has a higher interstitial fluid pressure than normal tissues.

[1024] Treatment with hyaluronan degrading enzymes, such as polymer-conjugated soluble hyaluronidase (e.g. PEGPH20) can degrade HA on accumulated tissues and cells, including on tumor cells. This treatment can reduce the hyaluronan such that the tissue deflates, the blood vessels expand, and more blood can flow through the site. Accordingly, treatment with a hyaluronan-degrading enzyme, such as a soluble hyaluronidase or polymer-conjugated soluble hyaluronidase (e.g. PEGPH20), can diminish interstitial fluid pressure (IFP) and water content at the tissue site and associated increased vascular perfusion, thereby treating hyaluronan-associated diseases and conditions, such as tumors and cancers. Accordingly, hyaluronan degrading enzymes for the combinations, uses and methods provided include any enzyme having the ability to catalyze the cleavage of a hyaluronan disaccharide chain or polymer.

[1025] Hyaluronan-degrading enzymes include hyaluronidases, as well as other enzymes such as chondrotinases and lyases that have the ability to cleave hyaluronan. Hyaluronidases are members of a large family of hyaluronan degrading enzymes. There are three general classes of hyaluronidases: mammalian-type hyaluronidases, bacterial hyaluronidases and hyaluronidases from leeches, other parasites and crustaceans. Mammalian-type hyaluronidases (EC 3.2.1.35) are endo-β-N-acetyl-hexosaminidases that hydrolyze the β-1→4 glycosidic bond of hyaluronan into various oligosaccharide lengths such as tetrasaccharides and hexasaccharides. These enzymes have both hydrolytic and transglycosidase activities, and can degrade hyaluronan and chondroitin sulfates (CS), generally C4-S and C6-S. Five hyaluronidase-like genes have been identified in the human genome, PH20 (or SPAM1), HYAL1, HYAL2, HYAL3, HYAL4 and HYALP1.

[1026] Mammalian hyaluronidases can be further subdivided into those that are neutral active, predominantly found in testes extracts, and acid active, predominantly found in organs such as the liver. HYALP1 is a pseudogene, and HYAL3 has not been shown to possess enzyme activity toward any known substrates. HYAL4 is a chondroitinase and exhibits little activity towards hyaluronan. HYAL1 is the prototypical acid-active enzyme and PH20 (precursor polypeptide set forth in SEQ ID NO:551 and mature protein set forth in SEQ ID NO:480) is the prototypical neutral-active enzyme. Acid-active hyaluronidases, such as HYAL1 and HYAL2 generally lack catalytic activity at neutral pH (i.e., pH 7). For example, HYAL1 has little catalytic activity in vitro over pH 4.5 (Frost et al. (1997) Anal. Biochem. 251:263-269). HYAL2 is an acid-active enzyme with a very low specific activity in vitro. The hyaluronidase-like enzymes also can be characterized by those which are generally attached to the plasma membrane via a glycosylphosphatidyl inositol (GPI) anchor such as human HYAL2 and human PH20 (Danilkovitch-Miagkova et al. (2003) Proc Natl Acad Sci USA 100(8):4580-4585), and those which are generally soluble such as human HYAL1 (Frost et al. (1997) Biochem Biophys Res Commun. 236(1):10-15). Many hyaluronidases also are glycosylated, and require glycosylation for activity. For example, human PH20 contains six N-linked glycosylation sites at N82, N166, N235, N254, N368, N393 and S490 of the polypeptide exemplified in SEQ ID NO:551.

[1027] PH20 is naturally involved in sperm-egg adhesion and aids penetration by sperm of the layer of cumulus cells by digesting hyaluronic acid. PH20 is located on the sperm surface, and in the lysosome-derived acrosome, where it is bound to the inner acrosomal membrane. The human PH20 mRNA transcript is normally translated to generate a 509 amino acid precursor polypeptide (SEQ ID NO:551) containing a 35 amino acid signal sequence at the N-terminus (amino acid residue positions 1-35) and a 19 amino acid glycosylphosphatidylinositol (GPI) anchor attachment signal sequence at the C-terminus (amino acid residue positions 491-509). The mature PH20 therefore, is a 474 amino acid polypeptide set forth in SEQ ID NO:480. Following transport of the precursor polypeptide to the ER and removal of the signal peptide, the C-terminal GPI-attachment signal peptide is cleaved to facilitate covalent attachment of a GPI anchor to the newly-formed C-terminal amino acid at the amino acid position corresponding to position 490 of the precursor polypeptide set forth in SEQ ID NO:551. In contrast, clear GPI anchors are not predicted in many other PH20 species besides humans. Thus, PH20 polypeptides produced from ovine and bovine naturally exist as soluble forms. Though bovine PH20 exists very loosely attached to the plasma membrane, it is not anchored via a phospholipase sensitive anchor (Lalancette et al. (2001) Biol Reprod. 65(2):628-636). This unique feature of bovine hyaluronidase has permitted the use of the soluble bovine testes hyaluronidase enzyme as an extract for clinical use (Wydase®, Hyalase®).

[1028] Hence, hyaluronan-degrading enzymes exist in membrane-bound or soluble forms that are secreted from cells. Hyaluronan-degrading enzymes can be made soluble to be expressed and secreted from cells. For example, where hyaluronan-degrading enzymes include a glycosylphosphatidylinositol (GPI) anchor and/or are otherwise membrane-anchored or insoluble, hyaluronan-degrading enzymes can be provided in soluble form by truncation or deletion of all or a portion of the GPI anchor to render the enzyme secreted and soluble. Soluble hyaluronan-degrading enzymes can be used in the method of combination therapy provided herein. Thus, hyaluronan-degrading enzymes include truncated variants, e.g. truncated to remove all or a portion of a GPI anchor. Examples of such soluble hyaluronidases include soluble PH20 hyaluronides, such as any set forth in U.S. Pat. No. 7,767,429; U.S. Publication Nos. US20040268425, US20100143457 or US20130302275, see also exemplary soluble human PH20 hyaluronidases set forth in any of SEQ ID NOS:481-488, 493-514, or 526-532).

[1029] Various forms of hyaluronan degrading enzymes, including hyaluronidases have been prepared and approved for therapeutic use in subjects, including humans. For example, animal-derived hyaluronidase preparations include Vitrase® (ISTA Pharmaceuticals), a purified ovine testicular hyaluronidase, Amphadase® (Amphastar Pharmaceuticals), a bovine testicular hyaluronidase and Hydase™ (Prima Pharm Inc.), a bovine testicular hyaluronidase. Hylenex® (Halozyme Therapeutics) is a human recombinant hyaluronidase produced by genetically engineered Chinese Hamster Ovary (CHO) cells containing nucleic acid encoding soluble forms of PH20, designated rHuPH20 (see e.g., U.S. Publication Nos. US20040268425; U.S. Pat. No. 7,767,429). It is understood that any hyaluronidase preparation can be used in the method of combination therapy provided herein (see, e.g., U.S. Pat. Nos. 2,488,564, 2,488,565, 2,676,139, 2,795,529, 2,806,815, 2,808,362, 5,747,027 and 5,827,721 and International PCT Publication No. WO2005/118799; U.S. Publication Nos. US20040268425; U.S. Pat. No. 7,767,429; or any provided herein).

[1030] Described herein is a non-limiting examples of hyaluronan-degrading enzymes, such as hyaluronidase enzymes or soluble hyaluronidase enzyme, for example PH20, for use in the combinations and methods provided herein. Generally, such hyaluronan-degrading enzymes include those that are conjugated to a polymer. The hyaluronan-degrading enzyme, such as a hyaluronidase, can be, for example, of human origin, mammalian origin, bacterial origin, or other biological origin. In other examples, the hyaluronan-degrading enzyme can be modified, for example, by conjugation to a polymer.

### Soluble Hyaluronan Degrading Enzymes (e.g. Soluble PH20)

[1031] In particular, provided herein is a method of combination therapy and compositions that include any ADA2 protein provided herein, such as any variant ADA2 protein, and a soluble hyaluronan degrading enzymes, such as a soluble hyaluronidase (e.g. soluble PH20). Soluble hyaluronan degrading enzymes include any hyaluronan degrading enzymes that are secreted from cells (e.g. CHO cell) upon expression and exist in soluble form. Such enzymes include, but are not limited to, soluble hyaluronidases, including non-human soluble hyaluronidases, including non-human animal soluble hyaluronidases, bacterial soluble hyaluronidases and human hyaluronidases, Hyal1, bovine PH20 and ovine PH20, allelic variants thereof and other variants thereof. For example, included among soluble hyaluronan degrading enzymes are any hyaluronan degrading enzymes that have been modified to be soluble. For example, hyaluronan degrading enzymes that contain a GPI anchor can be made soluble by truncation of and removal of all or a portion of the GPI anchor. In one example, the human hyaluronidase PH20, which is normally membrane anchored via a GPI anchor, can be made soluble by truncation of and removal of all or a portion of the GPI anchor at the C-terminus.

[1032] Soluble hyaluronan degrading enzymes also include neutral active and acid active hyaluronidases. Depending on factors, such as, but not limited to, the desired level of activity of the enzyme following administration and/or site of administration, neutral active and acid active hyaluronidases can be selected. In a particular example, the hyaluronan degrading enzyme is a soluble neutral active hyaluronidase, such as a soluble PH20 polypeptide

[1033] The soluble PH20 polypeptide can be an ovine PH20, bovine PH20 or a soluble PH20 that is C-terminally truncated and lacks all or a portion of the GPI anchor attachment sequence. For example, exemplary of a soluble hyaluronidase is PH20 from any species or truncated forms thereof lacking all or a portion of the C-terminal GPI anchor, so long as the hyaluronidase is soluble (secreted upon expression) and retains hyaluronidase activity. In some instances, the soluble hyaluronan degrading enzyme, such as soluble PH20 is normally GPI-anchored (such as, for example, human PH20) and is rendered soluble by truncation at the C-terminus. Such truncation can remove all of the GPI anchor attachment signal sequence, or can remove only some of the GPI anchor attachment signal sequence. For example, up to 2, 3, 4, 5, 6, 7, 8, 9, 10, 11, 12, 13, 14, 15, 16, 17, 18, 19, 20, 21, 22, 23, 24, 25, 26, 27, 28, 29, 30, 31, 32, 33, 34, 35, 36, 37, 38, 39, 40, 41, 42, 43, 44, 45 or more C-terminal amino acid residues can be removed. The resulting polypeptide, however, is soluble. In instances where the soluble hyaluronan degrading enzyme, such as a soluble PH20, retains a portion of the GPI anchor attachment signal sequence, up to 1, 2, 3, 4, 5, 6, 7, 8, 9 or more amino acid residues in the GPI-anchor attachment signal sequence can be retained, provided the polypeptide is soluble. One of skill in the art can determine whether a polypeptide is GPI-anchored using methods well known in the art. Such methods include, but are not limited to, using known algorithms to predict the presence and location of the GPI-anchor attachment signal sequence and ω-site, and performing solubility analyses before and after digestion with phosphatidylinositol-specific phospholipase C (PI-PLC) or D (PI-PLD).

[1034] Typically, the soluble hylauronan degrading enzyme, such as a soluble PH20, is human. Although hylauronan degrading enzymes, such as PH20, from other animals can be utilized, such preparations are potentially immunogenic, since they are animal proteins. For example, a significant proportion of patients demonstrate prior sensitization secondary to ingested foods, and since these are animal proteins, all patients have a risk of subsequent sensitization. Thus, non-human preparations may not be suitable for chronic use. If non-human preparations are desired, it is contemplated herein that such polypeptides can be prepared to have reduced immunogenicity. Such modifications are within the level of one of skill in the art and can include, for example, removal and/or replacement of one or more antigenic epitopes on the molecule.

[1035] Exemplary of a soluble hyaluronidase is soluble human PH20. Soluble forms of recombinant human PH20 have been produced and are known. The production of such soluble forms of PH20 is described in U.S. Published Patent Application Nos. US20040268425; US20050260186, US20060104968, US20100143457 and International PCT application No. WO2009111066. Included among these polypeptides are soluble PH20 polypeptides that completely lack all or a portion of the GPI-anchor attachment signal sequence. For example, a soluble PH20 (esPH20) polypeptides can contain at least one amino acid of the GPI anchor or can lack all amino acid residues of the GPI anchor. Thus, instead of having a GPI-anchor covalently attached to the C-terminus of the protein in the ER and being anchored to the extracellular leaflet of the plasma membrane, these polypeptides are secreted and are soluble. C-terminally truncated PH20 polypeptides can be C-terminally truncated by 1, 2, 3, 4, 5, 6, 7, 8, 9, 10, 11, 12, 13, 14, 15, 16, 17, 18, 19, 20, 25, 30, 35, 40, 45, 50, 55, 60 or more amino acids compared to the full length wild type polypeptide, such as a full length wild type polypeptide with a sequence set forth in SEQ ID NO:480, or allelic or species variants or other variants thereof.

[1036] Soluble forms of human PH20 generally include those that contain amino acids 36-464 set forth in SEQ ID NO:551. For example, soluble forms include, but are not limited to, C-terminal truncated polypeptides of human PH20 set forth in SEQ ID NO:551 having a C-terminal amino acid residue 465, 466, 467, 468, 469, 470, 471, 472, 473, 474, 475, 476, 477, 478, 479, 480, 481, 482, 483, 484, 485, 486, 487, 488, 489, 490, 491, 492, 493, 494, 495, 496, 497, 498, 499 or 500 of the sequence of amino acids set forth in SEQ ID NO:551, mature forms thereof, or polypeptides that exhibit at least 850% identity thereto. For example, when expressed in mammalian cells, the 35 amino acid N-terminal signal sequence is cleaved during processing, and the mature form of the protein is produced and can be secreted. Thus, the mature soluble polypeptides contain amino acids 36 to 464, 465, 466, 467, 468, 469, 470, 471, 472, 473, 474, 475, 476, 477, 478, 479, 480, 481, 482, 483, 484, 485, 486, 487, 488, 489, 490, 491, 492, 493, 494, 495, 496, 497, 498, 499 or 500 of SEQ ID NO:441. Table 6 provides non-limiting examples of exemplary C-terminally truncated soluble PH20 polypeptides, including precursor and mature forms thereof. In Table 6 below, the length (in amino acids) of the precursor and mature polypeptides, and the sequence identifier (SEQ ID NO) in which exemplary amino acid sequences of the precursor and mature polypeptides of the C-terminally truncated PH20 proteins are set forth, are provided. The wild-type PH20 polypeptide also is included in Table 6 for comparison.

TABLE 6
Exemplary C-terminally truncated PH20 polypeptides

| Precursor | | | Mature | | |
|---|---|---|---|---|---|
| amino | | | amino | | |
| acids of | | | acids of | | |
| SEQ ID | length | SEQ ID | SEQ ID | length | SEQ ID |
| NO: 551 | (aa) | NO | NO: 551 | (aa) | NO |
| 1-509 | 509 | 551 | 36-509 | 474 | 480 |
| 1-500 | 500 | | 36-500 | 465 | 526 |
| 1-499 | 499 | | 36-499 | 464 | 493 |
| 1-498 | 498 | | 36-498 | 463 | 527 |
| 1-497 | 497 | | 36-497 | 462 | 494 |
| 1-496 | 496 | | 36-496 | 461 | 528 |
| 1-495 | 495 | | 36-495 | 460 | 495 |
| 1-494 | 494 | | 36-494 | 459 | 529 |
| 1-493 | 493 | | 36-493 | 458 | 496 |
| 1-492 | 492 | | 36-492 | 457 | 530 |
| 1-491 | 491 | | 36-491 | 456 | 497 |
| 1-490 | 490 | | 36-490 | 455 | 499 |
| 1-489 | 489 | | 36-489 | 454 | 498 |
| 1-488 | 488 | | 36-488 | 453 | 531 |
| 1-487 | 487 | | 36-487 | 452 | 500 |
| 1-486 | 486 | | 36-486 | 451 | 532 |
| 1-485 | 485 | | 36-485 | 450 | 501 |
| 1-484 | 484 | | 36-484 | 449 | 502 |
| 1-483 | 483 | | 36-483 | 448 | 488 |
| 1-482 | 482 | | 36-482 | 447 | 481 |
| 1-481 | 481 | | 36-481 | 446 | 482 |
| 1-480 | 480 | | 36-480 | 445 | 483 |
| 1-479 | 479 | | 36-479 | 444 | 484 |
| 1-478 | 478 | | 36-478 | 443 | 485 |
| 1-477 | 477 | | 36-477 | 442 | 486 |
| 1-476 | 476 | | 36-476 | 441 | 503 |
| 1-475 | 475 | | 36-475 | 440 | 504 |
| 1-474 | 474 | | 36-474 | 439 | 505 |
| 1-473 | 473 | | 36-473 | 438 | 506 |
| 1-472 | 472 | | 36-472 | 437 | 507 |
| 1-471 | 471 | | 36-471 | 436 | 508 |
| 1-470 | 470 | | 36-470 | 435 | 509 |
| 1-469 | 469 | | 36-469 | 434 | 510 |
| 1-468 | 468 | | 36-468 | 433 | 511 |
| 1-467 | 467 | | 36-467 | 432 | 487 |
| 1-466 | 466 | | 36-466 | 431 | 512 |
| 1-465 | 465 | | 36-465 | 430 | 513 |
| 1-464 | 464 | | 36-464 | 429 | 514 |

[1037] For example, soluble forms of PH20 for use in combinations provided herein include, for example, polypeptide that has the sequence of amino acids set forth in any of SEQ ID NOS:481-488, 493-514, or 526-532, or a sequence of amino acids that exhibits at least 85%, 86%, 87%, 88%, 89%, 90%, 91%, 92%, 93%, 94%, 95%, 96%, 97%, 98% or 99% sequence identity to a sequence of amino acids set forth in any of SEQ ID NOS:481-488, 493-514, or 526-532 and are soluble and retain hyaluronidase activity. Amino acid variants include conservative and non-conservative mutations. It is understood that residues that are important or otherwise required for the activity of a hyaluronidase, such as any described above or known to skill in the art, are generally invariant and cannot be changed. These include, for example, active site residues. Thus, for example, amino acid residues 111, 113 and 176 (corresponding to residues in the mature PH20 polypeptide set forth in SEQ ID NO:551) of a human PH20 polypeptide, or soluble form thereof, are generally invariant and are not altered. Other residues that confer glycosylation and formation of disulfide bonds required for proper folding also can be invariant.

[1038] In particular, a soluble human PH20 polypeptide is a polypeptide that is truncated after amino acid 482 of the sequence set forth in SEQ ID NO:551. Such a polypeptide can be generated from a nucleic acid molecule containing a signal sequence and encoding amino acids 36-482. The signal sequence can be the active signal sequence, an IgG kappa signal sequence or other signal sequence capable of processing the protein for secretion. Post translational processing removes the signal sequence, leaving a 474 amino acid soluble recombinant human PH20 (SEQ ID NO:480). A product produced upon expression results in a secreted product, designated rHuPH20, in the culture medium that exhibits heterogeneity at the C-terminus such that the product includes a mixture of species that can include any one or more of SEQ ID NOS:481-486 in various abundance. Typically, rHuPH20 is produced in cells that facilitate correct N-glycosylation to retain activity, such as mammalian cells, for example CHO cells (e.g., DG44 CHO cells). Hylenex® (Halozyme) is a human recombinant hyaluronidase produced by genetically engineered Chinese Hamster Ovary (CHO) cells containing nucleic acid encoding a truncated human PH20 polypeptide (designated rHuPH20).

[1039] Variants of PH20, such as a human PH20 (e.g., a soluble human PH20) are known and are described in U.S. published appl. No. US2013/0302275. Any PH20 variant described in U.S. published appl. No. US2013/0302275 can be incorporated into a soluble PH20 polypeptide for use in the combination provided herein. Such variants include those that exhibit increased resistance to a denaturation condition (e.g., a phenolic preservative) or increased activity. An example of such a polypeptide is a soluble human PH20 containing the amino acid replacement F204P, V58K or V58R with reference to the sequence of amino acids set forth in full length human PH20 set forth in SEQ ID NO:480 or in a soluble human PH20 set forth in any of SEQ ID NOS:481-488, 493-514, or 526-532.

[1040] Generally soluble forms of PH20 are produced using protein expression systems that facilitate correct N-glycosylation to ensure the polypeptide retains activity, since glycosylation is important for the catalytic activity and stability of hyaluronidases. Such cells include, for example Chinese Hamster Ovary (CHO) cells (e.g., DG44 CHO cells).

[1041] Hyaluronan degrading enzymes, including hyaluronidases (e.g., PH20), in the combinations provided herein can be recombinantly produced or can be purified or partially-purified from natural sources, such as, for example, from testes extracts. Methods for production of recombinant proteins, including recombinant hyaluronan degrading enzymes, are provided elsewhere herein and are well known in the art.

[1042] The hyaluronan degrading enzymes can be administered in forms that increase half-life. For example, the hyaluronan degrading enzyme can be provided as part of a liposome or multicellular laminar vesicle or other such delivery vehicle (see, e.g., Example 24 herein). The hyaluronan degrading enzyme can be encoded in a vector, such as an oncolytic vector or targeted vector for delivery.

[1043] The hyaluronan-degrading enzyme, such as a soluble hyaluronidase (e.g. a soluble PH20 polypeptide) provided in the combinations herein can be modified by a polymer. In some examples, the polymer is a polyalkylene glycol, dextran, pullulan or cellulose. Polyalkylene glycol polymers, which can modify the hyaluronan-degrading enzyme include polyethylene glycol (PEG) and methoxypolyethylene glycol (mPEG). In examples where the hyaluronan-degrading enzyme is modified by PEG, the PEG can by branched or linear. In some embodiments, the polymer can be produced by reaction with methoxy-poly(ethylene glycol)-succinimidyl butanoate (mPEG-SBA) (5 kDa); methoxy-poly(ethylene glycol)-succinimidyl butanoate (mPEG-SBA) (20 kDa); methoxy-poly(ethylene glycol)-succinimidyl butanoate (mPEG-SBA) (30 kDa); methoxy-poly(ethylene glycol)-succinimidyl α-methylbutanoate (mPEG-SMB) (20 kDa); methoxy-poly(ethylene glycol)-succinimidyl α-methylbutanoate (mPEG-SMB) (30 kDa); methoxy-poly(ethylene glycol)-butyraldehyde (mPEG-butyraldehyde) (30 kDa), methoxy-poly(ethylene glycol)-succinimidyl propionate (mPEG-SPA) (20 kDa); methoxy-poly(ethylene glycol)-succinimidyl propionate (mPEG-SPA) (30 kDa); (methoxy-poly(ethylene glycol))₂-N-hydroxysuccinimide ester (mPEG₂-NHS) (10 kDa branched); (methoxy-poly(ethylene glycol))₂-N-hydroxysuccinimide ester (mPEG₂-NHS) (20 kDa branched); (methoxy-poly(ethylene glycol))₂-N-hydroxysuccinimide ester (mPEG₂-NHS) (40 kDa branched); (methoxy-poly(ethylene glycol))₂-N-hydroxysuccinimide ester (mPEG₂-NHS) (60 kDa branched); biotin-poly(ethylene glycol)-N-hydroxysuccinimide ester (biotin-PEG-NHS) (5 kDa biotinylated); poly(ethylene glycol)-p-nitrophenyl carbonate (PEG-p-nitrophenyl-carbonate) (30 kDa); or poly(ethylene glycol)-propionaldehyde (PEG-propionaldehyde) (30 kDa). In some embodiments, the polymer can be a PEG that has a molecular weight of 30 or about 30 kilodaltons.

[1044] d. Antibodies to Treat Infectious Diseases

[1045] In some examples, any ADA2 provided herein, such as a wildtype, variants and modified forms thereof, is administered with one or more antibodies or antibody fragments to treat infectious diseases. Examples of antibodies that can be co-administered to treat infectious diseases include, but are not limited to, anti-anthrax antibodies such as ABthrax, anti-CMV antibodies such as CytoGam and sevirumab, anti-cryptosporidium antibodies such as CryptoGAM, Sporidin-G, anti-helicobacter antibodies such as Pyloran, anti-hepatitis B antibodies such as HepeX-B, Nabi-HB, anti-HIV antibodies such as HRG-214, anti-RSV antibodies such as felvizumab, HNK-20, palivizumab, RespiGam, and anti-staphylococcus antibodies such as Aurexis, Aurograb, BSYX-A110, and SE-Mab.

[1046] e. Antibiotics and Antifungals

[1047] In some examples, any ADA2 provided herein, including wildtype, variants and modified forms thereof, is administered with one or more antibiotics, including but not limited to: aminoglycoside antibiotics (e.g. apramycin, arbekacin, bambermycins, butirosin, dibekacin, gentamicin, kanamycin, neomycin, netilmicin, paromomycin, ribostamycin, sisomicin, spectinomycin), aminocyclitols (e.g. spectinomycin), amphenicol antibiotics (e.g. azidamfenicol, chloramphenicol, florfenicol, and thiamphenicol), ansamycin antibiotics (e.g. rifamide and rifampin), carbapenems (e.g. imipenem, meropenem, panipenem); cephalosporins (e.g. cefaclor, cefadroxil, cefamandole, cefatrizine, cefazedone, cefozopran, cefpimizole, cefpiramide, cefpirome, cefprozil, cefuroxime, cefixime, cephalexin, cephradine), cephamycins (cefbuperazone, cefoxitin, cefminox, cefmetazole, and cefotetan); lincosamides (e.g. clindamycin, lincomycin); macrolide (e.g. azithromycin, brefeldinA, clarithromycin, erythromycin, roxithromycin, tobramycin), monobactams (e.g. aztreonam, carumonam, and tigemonam); mupirocin; Oxacephems (e.g. flomoxef, latamoxef, and moxalactam); penicillins (e.g. amdinocillin, amdinocillin pivoxil, amoxicillin, bacampicillin, benzylpenicillinic acid, benzylpenicillin sodium, epicillin, fenbenicillin, floxacillin, penamecillin, penethamate hydriodide, penicillin o-benethamine, penicillin 0, penicillin V, penicillin V benzoate, penicillin V hydrabamine, penimepicycline, and phenethicillin potassium); polypeptides (e.g. bacitracin, colistin, polymixin B, teicoplanin, vancomycin); quinolones (amifloxacin, cinoxacin, ciprofloxacin, enoxacin, enrofloxacin, fleroxacin, flumequine, gatifloxacin, gemifloxacin, grepafloxacin, lomefloxacin, moxifloxacin, nalidixic acid, norfloxacin, ofloxacin, oxolinic acid, pefloxacin, pipemidic acid, rosoxacin, rufloxacin, sparfloxacin, temafloxacin, tosufloxacin, and trovafloxacin); rifampin; streptogramins (e.g. quinupristin, dalfopristin); sulfonamides (sulfanilamide, sulfamethoxazole); tetracyclines (chlortetracycline, demeclocycline hydrochloride, demethylchlortetracycline, doxycycline, Duramycin, minocycline, neomycin, oxytetracycline, streptomycin, tetracycline, and vancomycin).

[1048] In some examples, any ADA2 provided herein, including wildtype, variants and modified forms thereof, is administered with one or more anti-fungal agents, including but not limited to amphotericin B, ciclopirox, clotrimazole, econazole, fluconazole, flucytosine, itraconazole, ketoconazole, miconazole, nystatin, terbinafine, terconazole, and tioconazole. In some examples, an ADA2 provided herein is administered with one or more antiviral agents, including but not limited to protease inhibitors, reverse transcriptase inhibitors, and others, including type I interferons, viral fusion inhibitors, neuraminidase inhibitors, acyclovir, adefovir, amantadine, amprenavir, clevudine, enfuvirtide, entecavir, foscarnet, ganciclovir, idoxuridine, indinavir, lopinavir, pleconaril, ribavirin, rimantadine, ritonavir, saquinavir, trifluridine, vidarabine, and zidovudine.

### I. EXAMPLES

[1049] The following examples are included for illustrative purposes only and are not intended to limit the scope of the invention.

### Example 1

### Cloning of Human Adenosine Deaminase 2 (ADA2) and Generation of ADA2 Variants

[1050] A. Cloning of Wildtype (WT) ADA2

[1051] The wild type human adenosine deaminase (ADA2) gene including its signal sequence (nucleic acid sequence set forth in SEQ ID NO: 1; encoding the amino acid sequence set forth in SEQ ID NO:2 (precursor)) was amplified and cloned between the ScaI and XhoI restriction sites of the pCMV-Script vector (Agilent Technologies, Santa Clara, Calif.; Cat. No. 212220; sequence set forth in SEQ ID NO:6). At the C-terminal end of the coding sequence, the stop codon was replaced by nucleic acid sequence encoding the FLAG™ tag (nucleic acid sequence set forth in SEQ ID NO:8; encoding the amino acid sequence set forth in SEQ ID NO:9) and a stop codon, for purposes of protein purification and/or detection. The resulting construct pCMV-Script-hADA2-FLAG encodes the WT recombinant human ADA2-FLAG polypeptide (amino acid sequence set forth in SEQ ID NO:7).

[1052] B. Generation of ADA2 Variants

[1053] This resulting construct encoding the WT rHuADA2 described above was used to introduce site-specific amino acid substitutions to create ADA2 variants. As described in the subsections below, site-specific amino acid substitutions were generated based on modeling studies of ADA2 to identify residues indicated to be involved in heparin binding, catalytic activity, and/or to attenuate protein-protein interactions between ADA2 and any other receptors to which ADA2 binds. Each of the generated ADA2 variant was made from the pCMV-Script-hADA2-FLAG vector described above, with site-specific substitutions using the QuikChange Lightning Multi Site-Directed Mutagenesis Kit (Agilent Technologies, Santa Clara, Calif.; Cat. No. 210514) according to the manufacturer's instructions.

[1054] The generated variants are set forth in Table 7-12 below. The variants are designated with Zavialov numbering, adopted from the numbering used in the PDB accession Nos. 3LGG and 3LGD (amino acid sequence of the polypeptide used for crystal structure set forth in SEQ ID NO:4; based on Zavialov et al., J. Biol. Chem. 285:12367-12377 (2010)), and with mature ADA2 numbering, based on the mature human ADA2 amino acid sequence set forth in SEQ ID NO:5 (based on Uniprot accession No. Q9NZK5; the precursor amino acid sequence, containing amino acids residues 1-29 of the signal sequence, is set forth in SEQ ID NO:2). Table 1 sets forth the corresponding position numbers of Zavialov numbering (SEQ ID NO:4) and mature ADA2 numbering (SEQ ID NO:5).

[1055] a. Candidate Variants with Altered Heparin Binding

[1056] Heparin is a naturally occurring glycosaminoglycan, widely present on the surface of tissue throughout the body. ADA2 is known to physically interact with heparin (Zavialov et al., J. Biol. Chem. 285:12367-12377 (2010)), binding to heparin could deplete circulating levels of administered ADA2. To generate ADA2 variants with improved pharmacokinetics, replacement of residues identified herein, based on modeling studies, as involved in heparin binding were made. Two available crystal structures of human ADA2, as described in Zavialov et al., J. Biol. Chem. 285:12367-12377 (2010), were used to identify candidate positions for mutagenesis: crystal structure of ADA2 lacking bound heparin and expressed from drosophila cells (RCSB Protein Data Bank (PDB) No. 3LGG; human ADA2 bound to the transition state analog coformycin); and human ADA2 in the apo form (Protein Data Bank accession No. 3LGD; empty enzyme without any cofactors or substrates bound). From the crystal structures, electrostatic surface potential was calculated to identify surfaces on ADA2 that possess positive electrostatic potential, using the open source 3D molecular visualization package PyMOL. Surfaces with positive electrostatic potential can form complementary electrostatic interactions with the highly negatively charged heparin sulfate. From the electrostatic surface potential calculations, a set of lysine and arginine residues were identified as candidate sites for substitution with the amino acids alanine (for replacement of the positively charged lysine or arginine side chain with a methylene group without impacting the protein phi-psi angles), aspartate or glutamate (the two known negatively charged amino acids), to generate a charge repulsion between heparin and the ADA2 variant.

[1057] Based on the modeling, amino acid residues 14, 16, 23, 29, 220, 261, 280, 286, 312, 320, 324, 369, 374, 375, 444, 447, 455, 464, 472 or 473 by Zavialov numbering (corresponding to residues 11, 13, 20, 26, 217, 258, 277, 283, 309, 317, 321, 352, 366, 371, 372, 441, 444, 452, 461, 469 or 470, respectively, by mature numbering) were targeted for mutagenesis. ADA2 variants were generated by amino acid replacement of the amino acid at the position to alanine, aspartate or glutamate. Single amino acid replacements, as well as double and triple amino acid replacements also were made. Table 7 sets forth the amino acid replacements in exemplary candidate variants. Example 7 describes studies assessing the heparin binding and adenosine deaminase activity of select candidate variants set forth in Table 7.

TABLE 7
Candidate ADA2 Variants for Attenuated
Heparin Binding Properties (HBP)

| Replacement (Zavialov | Replacement (mature | |
|---|---|---|
| numbering) | ADA2 numbering) | SEQ ID NO: |
| K14A | K11A | 13 |
| K14D | K11D | 14 |
| K14E | K11E | 15 |
| K16A | K13A | 16 |
| K16D | K13D | 17 |
| K16E | K13E | 18 |
| R23A | R20A | 28 |
| R23D | R20D | 29 |
| R23E | R20E | 30 |
| K29A | K26A | 71 |
| K29D | K26D | 72 |
| K29E | K26E | 73 |
| R220A | R217A | 74 |
| R220D | R217D | 75 |
| R220E | R217E | 76 |
| K261A | K258A | 77 |
| K261D | K258D | 78 |
| K261E | K258E | 79 |
| R280A | R277A | 80 |
| R280D | R277D | 81 |
| R280E | R277E | 82 |
| R286A | R283A | 83 |
| R286D | R283D | 84 |
| R286E | R283E | 85 |
| K312A | K309A | 86 |
| K312D | K309D | 87 |
| K312E | K309E | 88 |
| K320A | K317A | 89 |
| K320D | K317D | 90 |
| K320E | K317E | 91 |
| K324A | K321A | 92 |
| K324D | K321D | 93 |
| K324E | K321E | 94 |
| R355A | R352A | 95 |
| R355D | R352D | 96 |
| R355E | R352E | 97 |
| R369A | R366A | 31 |
| R369D | R366D | 32 |
| R369E | R366E | 33 |
| K374A | K371A | 19 |
| K374D | K371D | 20 |
| K374E | K371E | 21 |
| K375A | K372A | 22 |
| K375D | K372D | 23 |
| K375E | K372E | 24 |
| R444A | R441A | 98 |
| R444D | R441D | 99 |
| R444E | R441E | 100 |
| K447A | K444A | 101 |
| K447D | K444D | 102 |
| K447E | K444E | 103 |
| K455A | K452A | 25 |
| K455D | K452D | 26 |
| K455E | K452E | 27 |
| K464A | K461A | 104 |
| K464D | K461D | 105 |
| K464E | K461E | 106 |
| K472A | K469A | 107 |
| K472D | K469D | 108 |
| K472E | K469E | 109 |
| K473A | K470A | 110 |
| K473D | K470D | 111 |
| K473E | K470E | 112 |
| K14A/R23A | K11A/R20A | 55 |
| K14A/R23A/K374A | K11A/R20A/K371A | 56 |
| R23A/K374A | R20A/K371A | 57 |
| K14A/K374A | K11A/K371A | 58 |

[1058] b. Candidate Active Site (AS) Variants

[1059] To generate ADA2 variants with improved catalytic efficiency, candidate variants were generated by replacement of amino acid residues in the active site as identified based on molecular modeling studies. The crystal structures of human ADA2, bound to the transition state analog coformycin (Protein Data Bank accession No. 3LGG) and in the apo form (Protein Data Bank accession No. 3LGD), as described above, were visualized using the open source 3D molecular modeling program PyMol. In silico site directed mutagenesis was performed using PyMol to evaluate the packing of introduced amino acid side chains to adenosine or adjacent residues within the active site, assess packing to adjacent residues near the active site or on the active pocket cleft, measure distances and potential for steric clashes of introduced residues, assess changes to the relative concavity of the active site pocket, and assess the potential for adenosine to access the active site. The selected residues targeted for mutagenesis were those identified herein as candidates for effecting improved catalytic efficiency (k_{cat}/Kₘ) for adenosine, and thereby have increased adenosine deaminase activity.

[1060] Based on the modeling, amino acid residues 89, 182, 222, 224, 265, 267, 269, 270 and 299 by Zavialov numbering (corresponding to residues 86, 179, 219, 221, 262, 264, 266, 267, or 296, by mature numbering) were targeted for mutagenesis. ADA2 variants were generated by amino acid replacement of the amino acid at the position to all nineteen other amino acids. Table 8 sets forth the amino acid replacements of exemplary candidate variants. Example 10 describes studies assessing the adenosine deaminase activity of select candidate variants.

TABLE 8
Candidate rHuADA2 Active Site (AS) variants

| Replacement | Replacement | |
|---|---|---|
| (Zavialov | (mature | SEQ |
| numbering) | numbering) | ID NO: |
| D89A | D86A | 113 |
| D89C | D86C | 114 |
| D89E | D86E | 115 |
| D89F | D86F | 116 |
| D89G | D86G | 117 |
| D89H | D86H | 118 |
| D89I | D86I | 119 |
| D89K | D86K | 120 |
| D89L | D86L | 121 |
| D89M | D86M | 122 |
| D89N | D86N | 123 |
| D89P | D86P | 124 |
| D89Q | D86Q | 125 |
| D89R | D86R | 126 |
| D89S | D86S | 127 |
| D89T | D86T | 128 |
| D89V | D86V | 129 |
| D89W | D86W | 130 |
| D89Y | D86Y | 131 |
| E182A | E179A | 46 |
| E182C | E179C | 132 |
| E182D | E179D | 45 |
| E182F | E179F | 133 |
| E182G | E179G | 50 |
| E182H | E179H | 134 |
| E182I | E179I | 135 |
| E182K | E179K | 136 |
| E182L | E179L | 137 |
| E182M | E179M | 138 |
| E182N | E179N | 139 |
| E182P | E179P | 140 |
| E182Q | E179Q | 141 |
| E182R | E179R | 142 |
| E182S | E179S | 47 |
| E182T | E179T | 48 |
| E182V | E179V | 49 |
| E182W | E179W | 143 |
| E182Y | E179Y | 144 |
| R222A | R219A | 41 |
| R222C | R219C | 145 |
| R222D | R219D | 146 |
| R222E | R219E | 147 |
| R222F | R219F | 148 |
| R222G | R219G | 149 |
| R222H | R219H | 150 |
| R222I | R219I | 151 |
| R222K | R219K | 38 |
| R222L | R219L | 152 |
| R222M | R219M | 153 |
| R222N | R219N | 40 |
| R222P | R219P | 154 |
| R222Q | R219Q | 39 |
| R222S | R219S | 155 |
| R222T | R219T | 156 |
| R222V | R219V | 157 |
| R222W | R219W | 158 |
| R222Y | R219Y | 159 |
| L224A | L221A | 42 |
| L224C | L221C | 160 |
| L224D | L221D | 161 |
| L224E | L221E | 162 |
| L224F | L221F | 163 |
| L224G | L221G | 44 |
| L224H | L221H | 164 |
| L224I | L221I | 165 |
| L224K | L221K | 166 |
| L224M | L221M | 167 |
| L224N | L221N | 168 |
| L224P | L221P | 169 |
| L224Q | L221Q | 170 |
| L224R | L221R | 171 |
| L224S | L221S | 172 |
| L224T | L221T | 173 |
| L224V | L221V | 43 |
| L224W | L221W | 174 |
| L224Y | L221Y | 175 |
| S265A | S262A | 51 |
| S265C | S262C | 176 |
| S265D | S262D | 177 |
| S265E | S262E | 178 |
| S265F | S262F | 179 |
| S265G | S262G | 180 |
| S265H | S262H | 181 |
| S265I | S262I | 182 |
| S265K | S262K | 183 |
| S265L | S262L | 184 |
| S265M | S262M | 53 |
| S265N | S262N | 54 |
| S265P | S262P | 185 |
| S265Q | S262Q | 186 |
| S265R | S262R | 187 |
| S265T | S262T | 188 |
| S265V | S262V | 52 |
| S265W | S262W | 189 |
| S265Y | S262Y | 190 |
| H267A | H264A | 34 |
| H267C | H264C | 191 |
| H267D | H264D | 192 |
| H267E | H264E | 193 |
| H267F | H264F | 194 |
| H267G | H264G | 37 |
| H267I | H264I | 195 |
| H267K | H264K | 196 |
| H267L | H264L | 197 |
| H267M | H264M | 198 |
| H267N | H264N | 36 |
| H267P | H264P | 199 |
| H267Q | H264Q | 35 |
| H267R | H264R | 200 |
| H267S | H264S | 201 |
| H267T | H264T | 202 |
| H267V | H264V | 203 |
| H267W | H264W | 204 |
| H267Y | H264Y | 205 |
| S269A | S266A | 206 |
| S269C | S266C | 207 |
| S269D | S266D | 208 |
| S269E | S266E | 209 |
| S269F | S266F | 210 |
| S269G | S266G | 211 |
| S269H | S266H | 212 |
| S269I | S266I | 213 |
| S269K | S266K | 214 |
| S269L | S266L | 215 |
| S269M | S266M | 216 |
| S269N | S266N | 217 |
| S269P | S266P | 218 |
| S269Q | S266Q | 219 |
| S269R | S266R | 220 |
| S269T | S266T | 221 |
| S269V | S266V | 222 |
| S269W | S266W | 223 |
| S269Y | S266Y | 224 |
| K270A | K267A | 225 |
| K270C | K267C | 226 |
| K270D | K267D | 227 |
| K270E | K267E | 228 |
| K270F | K267F | 229 |
| K270G | K267G | 230 |
| K270H | K267H | 231 |
| K270I | K267I | 232 |
| K270L | K267L | 233 |
| K270M | K267M | 234 |
| K270N | K267N | 235 |
| K270P | K267P | 236 |
| K270Q | K267Q | 237 |
| K270R | K267R | 238 |
| K270S | K267S | 239 |
| K270T | K267T | 240 |
| K270V | K267V | 241 |
| K270W | K267W | 242 |
| K270Y | K267Y | 243 |
| V299A | V296A | 244 |
| V299C | V296C | 245 |
| V299D | V296D | 246 |
| V299E | V296E | 247 |
| V299F | V296F | 248 |
| V299G | V296G | 249 |
| V299H | V296H | 250 |
| V299I | V296I | 251 |
| V299K | V296K | 252 |
| V299L | V296L | 253 |
| V299M | V296M | 254 |
| V299N | V296N | 255 |
| V299P | V296P | 256 |
| V299Q | V296Q | 257 |
| V299R | V296R | 258 |
| V299S | V296S | 259 |
| V299T | V296T | 260 |
| V299W | V296W | 261 |
| V299Y | V296Y | 262 |

[1061] c. Candidate Variants with Altered Glycosylation

[1062] To generate ADA2 variants that are hyperglycosylated, candidate variants were generated by mutation (e.g. insertion and/or amino acid replacement) of residues to create an N-glycosylation site by incorporation of a new N-glycosylation site motif (Asn-Xaa-Ser/Thr). Table 9 sets forth the mutations of exemplary candidate variants.

TABLE 9
Candidate rHuADA2 hyperglycosylation variants

| Mutation | Mutation | |
|---|---|---|
| (Zavialov | (mature | SEQ |
| numbering) | numbering) | ID NO: |
| ——→N4/——→A5/ | ——→N1/——→A2/ | 274 |
| ——→S6 | ——→S3 | |
| R23N/V25S | R20N/V22S | 275 |
| K374N/D376S | K371N/D373S | 276 |
| K375N/I377S | K372N/I374S | 277 |
| T406N/H408S | T403N/H405S | 278 |
| G407N/P409S | G404N/P406S | 279 |

[1063] d. Candidate Variants Lacking the Receptor Binding (PRB) Domain

[1064] To generate ADA2 variants that lack the receptor binding (PRB) domain, residues V102-Q147 (V99-Q144 by mature numbering) or C108-T150 (C105-T147 by mature numbering) were deleted and replaced with aglycine linker of various lengths (e.g., 3, 5, 7, 10 or 15; see SEQ ID NO:280) or (GGGGS)n linker of various length (e.g., n=5, 2 or 3; see SEQ ID NOS:581 and 582). Table 10 sets forth the mutations of exemplary candidate variants.

TABLE 10
Candidate rHuADA2 PRB domain deletion variants

| Mutation | Mutation | |
|---|---|---|
| (Zavialov | (mature | SEQ |
| numbering) | numbering) | ID NO: |
| C108-T150del→(Gly)₁₅ | C105-T147del→(Gly)₁₅ | 281 |
| C108-T150del→(Gly)₁₀ | C105-T147del→(Gly)₁₀ | 282 |
| C108-T150del→(Gly)₇ | C105-T147del→(Gly)₇ | 283 |
| C108-T150del→(Gly)₅ | C105-T147del→(Gly)₅ | 284 |
| C108-T150del→(Gly)₃ | C105-T147del→(Gly)₃ | 285 |
| V102-Q147del→(GGGGS)₁ | V99-Q144del→(GGGGS)₁ | 583 |
| V102-Q147del→(GGGGS)₂ | V99-Q144del→(GGGGS)₂ | 584 |
| V102-Q147del→(GGGGS)₃ | V99-Q144del→(GGGGS)₃ | 585 |
| C108-T150del→(GGGGS)₁ | C105-T147del→(GGGGS)₁ | 586 |
| C108-T150del→(GGGGS)₂ | C105-T147del→(GGGGS)₂ | 587 |
| C108-T150del→(GGGGS)₃ | C105-T147del→(GGGGS)₃ | 588 |

[1065] e. Candidate Variants with Altered Glycosylation in the Receptor Binding (PRB) Domain

[1066] To disrupt the potential interaction of ADA2 with potential receptors through the receptor binding (PRB), ADA2 candidate variants were generated by introducing mutation (e.g. insertion and/or amino acid replacement) of residues to create an N-glycosylation site by incorporation of a new N-glycosylation site motif (Asn-Xaa-Ser/Thr) in the PRB domain. Table 11 sets forth the mutations of exemplary candidate variants.

TABLE 11
Candidate rHuADA2 PRB domain hyperglycosylation variants

| Mutation | Mutation | |
|---|---|---|
| (Zavialov | (mature | SEQ |
| numbering) | numbering) | ID NO: |
| R128N/P129A | R125N/P126A | 552 |
| S130N/K132S | S127N/K129S | 553 |
| P129N/E131T | P126N/E128T | 554 |
| R115N/I117T | R112N/I114T | 555 |
| I137N/L138C/L139T | I134N/L135C/L136T | 556 |
| I137N/L138S/L139T | I134N/L135S/L136T | 557 |
| R145N/Q147S | R142N/Q144S | 558 |
| E140N/Y142T | E137N/Y139T | 559 |
| P114N/G116S | P111N/G113S | 560 |

[1067] f. Candidate Variants with Altered Interaction Between Receptor Binding (PRB) Domain and the ADA Domain

[1068] To generate ADA2 variants that have altered interaction between the receptor binding (PRB) domain and the rest of ADA2 (e.g., the adenosine deaminase (ADA) domain), mutation(s) were introduced in individual or multiple amino acids in the PRB domain.

[1069] Structure based design was used to identify residues on the surface of ADA2 in the context of its three dimensional structure that could disrupt the ability of the PRB domain to interact with other contact residues outside of the PRB domain in ADA2. Table 12 sets forth the mutations of exemplary candidate variants.

TABLE 12
Candidate rHuADA2 PRB domain interaction variants

| Mutation | Mutation | |
|---|---|---|
| (Zavialov | (mature | SEQ |
| numbering) | numbering) | ID NO: |
| F122S | F119S | 561 |
| F122K | F119K | 562 |
| Y227R | Y224R | 563 |
| Y227N | Y224N | 564 |
| Y194S | Y191S | 565 |
| Y194D | Y191D | 566 |
| F186K | F183K | 567 |
| Y194D/Y227R | Y191D/Y224R | 568 |
| F112S | F109S | 569 |
| F112A | F109A | 570 |
| R121D | R118D | 571 |
| R121A | R118A | 572 |
| Y142T | Y139T | 573 |
| Y142A | Y139A | 574 |
| W136S | W133S | 575 |
| W136T | W133T | 576 |
| P127A | P124A | 577 |
| P127S | P124S | 578 |

### Example 2

### Production of Recombinant Human Adenosine Deaminase 2 (rHuADA2) and Variants

[1070] A. Transient Expression

[1071] For transient expression of wildtype ADA2 and variants generated in Example 1, 300 ml of 1.0×10⁶ cells/ml CHO-S cells (Invitrogen, Cat. No. 11619-012) were transfected with 375 μg of pCMV-Script-hADA2-FLAG plasmid or variant plasmid using FreeStyle™ MAX Reagent (Life Technologies, Carlsbad, Calif.; Cat. No. 16447-500). Transfected cells were grown for 4 days, and culture supernatant was collected by centrifugation at 100 rpm for 10 min.

[1072] The collected supernatant was used to purify the protein, either mature ADA2 set forth in SEQ ID NO:5 or a mature variant (e.g. variants set forth in Tables 7-12), each with a FLAG tag. Batch purification was performed using an anti-FLAG M2 affinity resin (Sigma-Aldrich, St. Louis, Mo., Cat. No. A2220), following the manufacturer's instructions. ADA2 were eluted from the resin using FLAG™ peptide. Purity of the eluted protein was assessed using SDS-PAGE and size-exclusion chromatography (SEC). SEC results confirmed that the purified protein was a dimer. N-terminal sequencing also was performed and confirmed the signal sequence corresponds to amino acid residues 1-29 of SEQ ID NO:2, such that the mature protein as purified begins with amino acid residues IDET as set forth in SEQ ID NO:5.

[1073] C. Cloning and Stable Expression

[1074] The wild type human ADA2 gene (nucleic acid sequence set forth in SEQ ID NO: 1) or variant with a C-terminal FLAG™ tag (nucleic acid sequence set forth in SEQ ID NO:8; encoding the amino acid sequence set forth in SEQ ID NO:9) was subcloned into the multiple cloning site (MCS) of lentiviral expression vector pLV-EF1a-MCS-IRES-GFP-Bsd. The resulting expression vector, pLV-EF1a-hADA2-Flag-IRES-GFP-Bsd (nucleic acid sequence set forth in SEQ ID NO: 10) was used to generate a lentivirus capable of stably transfecting CHO-S cells. In the expression vector, expression of the recombinant human ADA2 gene was driven by the EF1a promoter. An IRES sequence was inserted after the transgene followed by the cDNA for green fluorescent protein (GFP) used for identification of transduced cells by microscopy, in combination with the blasticidin resistance gene (Bsd) used for selection of transduced cells. The Woodchuck Hepatitis Virus Posttranscriptional Regulatory Element (WPRE) was inserted after the GFP-Bsd sequence to enhance gene expression.

[1075] The constructed lentivirus expression vector pLV-EF1a-hADA2-Flag-IRES-GFP-Bsd was used to produce lentivirus as described in the ViraPower™ (Invitrogen, Carlsbad, Calif.) manufacturer's instruction manual. Briefly, 293FT cells were plated at 6×10⁶ cells onto 10 cm tissue culture plates. After 24 hours, 9 μg of the ViraPower™ Packaging Mix (containing a mixture of the pLP1, pLP2, and pLP/VSVG plasmids at 1 μg/μl in TE Buffer, pH 8.0 as supplied by manufacturer) and 3 μg of the pLV-EF1a-hADA2-Flag-IRES-GFP-Bsd lentiviral expression plasmid were mixed in 1.5 mL Opti-MEM (Life Technologies) medium. 36 μL of Lipofectamine™ 2000 (LF2000; Life Technologies, Carlsbad, Calif.) were diluted into 1.5 mL Opti-MEM (Life Technologies). The DNA and LF2000 were mixed gently, and incubated at room temperature for 20 minutes to allow the DNA and lipid to form complexes. In the meantime, the overnight culture medium was replaced with 5.0 mL Opti-MEM+10% FBS without antibiotics. The DNA-LF2000 complexes were added to the 293FT cells for transfection. The cells were incubated overnight at 37° C. in a humidified 5% CO₂incubator. The medium containing the DNA-LF2000 complexes was replaced with 10 mL complete medium and the cells were incubated overnight at 37° C. in a humidified 5% CO₂ incubator. The supernatant was collected at 48 hours post-transfection and the medium was transferred to a sterile storage tube. The virus-containing medium was centrifuged at 3000 rpm for 5 minutes to pellet any 293FT cells that were carried over during collection. The supernatant was carefully transferred to a sterile storage tube.

[1076] For transduction, CHO-S cells (Life Technologies, Carlsbad, Calif.; Cat. No. 16447-500) were cultured in CD CHO medium (Life Technologies, Carlsbad, Calif.; Cat. No. 10743-029). Transduction of the CHO-S cell line was performed in six-well plates containing 2×10⁷ lentiviral infectious units (IU) and 2×10⁶ CHO-S cells in 2 mL of CD-CHO medium supplemented with 4 mM Glutamax (Invitrogen, Carlsbad Calif.) and 4 μg/mL hexadimethrine bromide (Polybrene; Biosettia, San Diego, Calif.). Infected cells were incubated with shaking at about 30 rpm at 37° C. in a humidified-air incubator with 5% CO₂ for 6 hours. The cells were then harvested and centrifuged at low speed (1000×g, 5 min) and the transduction medium was removed and replaced with fresh CD-CHO medium. The cells were transferred to a T-25 mL vented flask and returned to the incubator. Four days after initial infection, the medium was supplemented with 1 μg/mL of blasticidin (Invitrogen, Carlsbad, Calif.). The medium was changed every 3-4 days until the confluency of the CHO-S cells reached approximately 90% and cells began to detach from the flasks. The cells were transferred to shaker flasks for expansion, cell banking and protein production.

[1077] Conditioned medium was collected to purify the protein, either mature ADA2 set forth in SEQ ID NO:5 or a mature variant (e.g. set forth in Tables 7-12), each with a FLAG tag. Two to five liters of conditioned medium was harvested and passed over an anti-FLAG M2 affinity resin (Sigma-Aldrich, St. Louis, Mo., Cat. No. A2220). The resin was equilibrated with approximately 10 bed volumes of wash buffer (Tris Buffered Saline (TBS), pH 7.5) at a flow rate of 4 mL/min before loading the conditioned medium. The loaded column was then washed with ˜10 bed volumes of TBS and then connected to an AKTA Purifier (GE Healthcare, Pittsburgh, Pa.), and the bound protein was eluted using a low pH buffer (0.1 M of Glycine-HCl at pH 2.7). The fractions were immediately neutralized with 1/10 volume of 1 M Tris-HCl, pH 8.8.

[1078] The fractions of purified protein were pooled and dialyzed in 4 liters of PBS with two buffer changes using a Slide-A-Lyzer Dialysis Cassette (20 kD MWCO; Thermo Fisher Scientific, Rockford, Ill.). The dialyzed protein product was then concentrated using an Amicon Ultra centrifugal concentrator (30 kD MWCO; EMD Millipore, Billerica, Mass.) and the final protein concentration determined using the Pierce™ BCA Protein Assay Kit (Thermo Fisher Scientific, Rockford, Ill.). Purity of the preparation was assessed using SDS-PAGE, and adenosine deaminase activity was tested as described below in Example 4.

[1079] Purity of the rHuADA2-FLAG protein preparation, as assessed by SDS-PAGE was 95% or greater. The preparation was also characterized by size-exclusion chromatography (SEC), which showed that the rHuADA2-FLAG protein was present as a single molecular weight species with greater than 95% purity as assessed by area under the curve (AUC) calculations.

[1080] Alternatively, the wild type rHuADA2 and variants were expressed using the CHO Freedom CHO-S Kit (Invitrogen) according to the manufacturer's specification and purified as described above.

### Example 3

### Production of Recombinant Human Adenosine Deaminase 1 (rHuADA1)

[1081] A. Cloning of Wildtype (WT) ADA1

[1082] The human adenosine deaminase 1 (ADA1) gene (nucleic acid sequence set forth in SEQ ID NO: 11; encoding the amino acid sequence set forth in SEQ ID NO: 12) was amplified and cloned into the pD444-SR: T5-sRBS-ORF (DNA 2.0, Menlo Park, Calif.; Cat. No. FPB-27-444) E. coli expression vector, under the control of an Isopropyl-o-D-thiogalactopyranoside (IPTG) inducible promoter (DNA 2.0, Menlo Park, Calif.). The construct also contained a linker (amino acid sequence set forth in SEQ ID NO:64) and a C-terminal Strep-tag (amino acid sequence set forth in SEQ ID NO:65) to facilitate affinity purification of the protein. The amino acid sequence of the encoded ADA1-Strep is set forth in SEQ ID NO:3. In the mature form of the protein, the N-terminal methionine residue is removed, so that the mature ADA1-Strep polypeptide has the amino acid sequence set forth in SEQ ID NO:67 (corresponding to a mature polypeptide sequence set forth in SEQ ID NO:66, without the Strep tag).

[1083] B. Generation of ADA1 Variants

[1084] This resulting construct encoding the WT rHuADA1-Strep was used to introduce site-specific amino acid substitutions to create ADA1 variant C74S, with numbering based on the mature ADA1 set forth in SEQ ID NO:67 (corresponding to C75S with number based on polypeptide set forth in SEQ ID NO: 12). The variant was generated as a candidate to stabilize activity because a solvent exposed cysteine residue in ADA1 could be oxidized in plasma and negatively impact enzymatic activity in the plasma. Site-specific substitution was made using the QuikChange Lightning Multi Site-Directed Mutagenesis Kit (Agilent Technologies, Santa Clara, Calif.; Cat. No. 210514) according to the manufacturer's instructions. In the mature form of the protein, the mature C74S-ADA1-Strep variant has the sequence of amino acids set forth in SEQ ID NO:69 (corresponding to a mature polypeptide sequence set forth in SEQ ID NO:70, without the Strep tag).

[1085] C. Expression in E. coli

[1086] For expression of wildtype ADA1 and variant, the resulting cloned construct was transformed into Escherichia coli BL21-DE3 (Calbiochem, San Diego, Calif.). The transformed bacteria were plated onto Luria Broth (LB) agar-ampicillin plates (TekNova, Hollister, Calif.) and single colony selected for large scale culture. The bacteria from the selected colony was grown overnight (37° C., 200 rpm) in LB medium supplemented with the antibiotic carbenicillin (50 μg/mL; EMD Millipore, Billerica, Mass.). The culture was used to seed large shaker cultures. The culture was allowed to grow until it reached an OD₆₀₀ of approximately 0.8 and then expression of protein was induced by the addition of 1 mM IPTG. The culture was then transferred to a 25° C. incubator and allowed to grow overnight (˜15 hours) with shaking at 200 rpm. The following day, the bacterial cells were centrifuged at 9000×g for 30 min and the cells in the pellet were lysed by sonication using a Branson Sonifier 250 (Emerson, Danbury, Conn.) using repeated pulsing on ice at 20% duty cycle for approximately 5 min. The bacterial lysate was then incubated with lysozyme (100 μg/mL; Sigma-Aldrich, St. Louis, Mo.) and Benzonase (50 U/mL; Sigma-Aldrich, St. Louis, Mo.) for four hours at 4° C. with gentle stirring. The bacterial lysate was centrifuged (5000×g; 45 min) to remove cell debris.

[1087] The culture lysate was used to purify the protein, either mature ADA1 set forth in SEQ ID NO:66 or a mature C74S-ADA1 variant set forth in SEQ ID NO:69, each with a Strep tag. The clarified lysate was removed and sterile filtered prior to being loaded onto a StrepTrap™ columns containing StrepTactin™ affinity resins (5 mL capacity; GE Healthcare, Pittsburgh, Pa.). The column was then connected to an AKTA purifier and protein was eluted using a solution of 2.5 mM d-desthiobiotin in buffer (100 mM Tris-HCl, pH 8.0, 150 mM NaCl, 1 mM EDTA). The fractions containing the purified protein were pooled and dialyzed at 4° C. in 4 liters of 1×Phosphate Buffered Saline (PBS) buffer for 4 hours with two buffer changes using a Slide-A-Lyzer Dialysis Cassette (20 kD MWCO; Thermo Fisher Scientific, Rockford, Ill.). The protein preparation was then concentrated using an Amicon Ultra centrifugal concentrator (30 kD MWCO; EMD Millipore, Billerica, Mass.) and the final protein concentration determined using the Pierce™ BCA Protein Assay Kit (Thermo Fisher Scientific, Rockford, Ill.). The purity of the protein preparation, as assessed by SDS-PAGE was 95% or greater.

### Example 4

### Adenosine Deaminase Enzymatic Activity Test

[1088] Adenosine deaminase activity was determined using an adenosine deaminase (ADA) assay kit (Genway, San Diego, Calif.; Cat. No. BQ014EALD) with minor modifications. The ADA assay is based on the enzymatic deamination of adenosine to inosine, which is converted to hypoxanthine by purine nucleoside phosphorylase (PNP). Hypoxanthine is then converted to uric acid and hydrogen peroxide by xanthine oxidase (XOD). Hydrogen peroxide is further reacted with N-Ethyl-N-(2-hydroxy-3-sulfopropyl)-3-methylaniline (EHSPT) and 4-aminoantipyrine (4-AA) in the presence of peroxidase (POD) to generate quinone dye, which is monitored in a kinetic manner.

[1089] Briefly, 5 μL samples in duplicates (at appropriate dilutions to measure steady-state, non-saturating enzyme activity) were added to 120 μL RI reagent (provided by the manufacturer; 50 mM Tris HCL, pH 8.0, 2 mM 4-AA, 0.1 U/mL PNP, 0.2 U/mL XOD, 0.6 U/mL peroxidase) in a 96 well plate, according to manufacturer's instructions. The mixtures were incubated at 37° C. for approximately 5 min and 60 μL of R2 reagent (provided by the manufacturer; 50 mM Tris HCl, pH 4.0, 10 mM Adenosine, 2 mM EHSPT) was added to the mixtures. Then, change in absorbance (AA) at 556 nm over time at 37° C. was measured. One unit of ADA is the amount of ADA that generates one μmole of inosine from adenosine per minute at 37° C. Adenosine deaminase activity in mU/mL was calculated using the following formula:

1 mU/mL=(ΔA/min×Tᵥ)/(Sᵥ×ε×1)
[1090] where Tᵥ=total volume (185 μL), Sᵥ=sample volume (5 μL), E=32.2×10⁻³ μM⁻¹cm⁻¹, 1=0.5 cm.

### Example 5

### In Vitro Plasma Stability of ADA1 Versus ADA2

[1091] The enzymatic activity of the purified preparation of WT rHuADA1, rHuADA1-C74S and rHuADA2, before and after incubation in mammalian plasma over a 24 hour time period, was assayed to test the stability of the recombinant protein preparations. The variant rHuADA1-C74S also was tested to determine whether stability in plasma can be improved by substitution of the solvent-exposed cysteine residue.

[1092] A. Incubation of Purified rHuADA1 and rHuADA2 Preparations in Plasma

[1093] Purified rHuADA1, rHuADA2 and rHuADA1-C74S preparations were individually added to ex vivo 25% BALB/c mouse plasma at a final concentration of 0.17 mg/ml (corresponding to an approximate equivalent dose of 10 mg/kg equivalent in a mouse). The samples were incubated at 37° C. for 24 hours. As a control, proteins were individually incubated at a concentration of 0.17 mg/ml in PBS containing 0.2% BSA (as a stabilizer). At 0, 4 and 24 hours after incubation, 3 small aliquots of each plasma incubated sample and each PBS incubated controls were removed and stored at −20° C. until subsequent analysis.

[1094] The stability of the proteins in ex vivo plasma after incubation was determined by comparing the changes in adenosine deaminase enzymatic activity using the method described in Example 4. The molecular weight and stability of the protein also was examined by Western blot to detect any possible protein degradation. Approximately 200 ng of protein were individually assayed using Western blot and the protein bands were detected using ECL (Bio-Rad Laboratories, Hercules, Calif.). Rabbit-anti-human ADA1 (Abcam, Cambridge, Mass.) and goat-anti-rabbit-horseradish peroxidase (HRP) (EMD Millipore, Billerica, Mass.) were used as primary and secondary antibodies, respectively, for rHuADA1. Anti-FLAG-HRP (Abcam) was used to detect rHuADA2.

[1095] B. Results

[1096] 1. rHuADA1 Stability

[1097] Table 13 shows the mean and standard deviation (stdev) of the adenosine deaminase activity test of WT rHuADA1 and rHuADA1-C74S. The results show that there was a significant reduction of rHuADA1 activity after a 24-hour incubation in plasma at 37° C. For example, less than 1% of activity was retained after treatment with plasma for 24 hours, whereas greater than 80% of activity was retained when in the PBS/BSA control for the same time period. The observed decrease in activity was not caused by protein degradation, since the protein level was relatively constant at all time-points, as measured by western blot.

[1098] The results also show that the solvent-exposed cysteine residue (C74) does not account for the negative impact on enzyme activity in plasma, since similar results were obtained for the C74S variant. For example, despite not possessing the exposed thiol at position 74, the variant still showed a strong decrease in activity after a 24 hour incubation in plasma. The results showed that after 24 hours, about 1% of activity of the variant enzyme was retained after treatment with plasma, whereas greater than 80% of activity was retained when in the PBS/BSA control.

[1099] Normally, ADA1 is expressed in an intracellular manner and is known to translocate and associate with extracellular dipeptidyl peptidase-4 (DPPIV). These results demonstrate that outside of this environment, ADA1 is rapidly inactivated by exposure to plasma, and that the mutation of the surface exposed cysteine 74 did not prevent inactivation.

TABLE 13
rHuADA1 and rHuADA1-C74S activity after serum incubation

| | | PBS | Plasma | | |
|---|---|---|---|---|---|
| | | incubated | incubated | PBS | Plasma |
| | Time | mean | mean | incubated | incubated |
| | (hr) | (mU/mL) | (mU/mL) | Stdev | Stdev |
| rHuADA1 | 0 | 61,077.0 | 71,663.6 | 2,352.2 | 2,461.4 |
| | 4 | 59,544.8 | 46,772.1 | 3,352.5 | 4,645.3 |
| | 24 | 50,287.9 | 673.6 | 700.5 | 135.7 |
| rHuADA1- | 0 | 43,031.9 | 59,632.4 | 2,695.6 | 4,890.5 |
| C74S | 4 | 44,682.4 | 39,636.7 | 3,739.6 | 1,671.4 |
| | 24 | 37,492.2 | 616.6 | 751.4 | 44.7 |

[1100] 2. rHuADA2 Stability

[1101] Table 14 below shows the mean and standard deviation (stdev) of the adenosine deaminase activity test of rHuADA2 after a 24 hour incubation with plasma. In contrast to the results for ADA1, the results show that ADA2 was substantially more stable in plasma after a 24-hour incubation at 37° C. For example, about 65% of activity was retained after treatment with plasma for 24 hours, whereas no change in activity was observed when treated with PBS/BSA control for the same time period.

TABLE 14
rHuADA2 activity after serum incubation

| | PBS | Plasma | | |
|---|---|---|---|---|
| | incubated | incubated | PBS | Plasma |
| Time | mean | mean | incubated | incubated |
| (hr) | (mU/mL) | (mU/mL) | Stdev | Stdev |
| 0 | 9,140.5 | 10,988.4 | 1,058.8 | 1,827.9 |
| 4 | 9,584.6 | 10,936.1 | 1,697.8 | 1,784.5 |
| 24 | 9,832.1 | 7,147.8 | 1,310.6 | 1,014.8 |

### Example 6

### Effect of ADA2 on Adenosine-Mediated Modulation of Immune Response

[1102] Extracellular adenosine is an inflammatory modulator of immune responses, and elevated levels of adenosine in the tumor microenvironment could reduce and/or inhibit the effector function of T and NK cells, thus favoring tumor growth. To assess if effects of adenosine can be monitored by assessing immune cell proliferation, proliferation experiments were performed with a mixture of NK and T cells (NK/T). In addition, experiments were performed to assess if rHuADA2, through its enzymatic conversion of adenosine to inosine, can rescue the immune cells from adenosine-mediated proliferation inhibition.

[1103] A. Assessing Effects of Adenosine on NK/T Cell Proliferation

[1104] A mixture of NK and T cells (NK/T) were prepared from healthy donor's peripheral blood mononuclear cells (PBMC). Briefly, 10×10⁷ Human PBMCs were cultured for 6-7 days in Stem cell growth medium (SCGM; Order No. 20802-0500, CellGenix, Freiburg, Germany) with 5% human serum from donors with blood type AB (human AB serum; Cat. No. 35-060-C1, Mediatech, Manassas, Va.) in the presence of 20 ng/mL anti-CD3 eBioscience, San Diego, Calif.; Cat. No. 16-0039) and 500 IU/mL recombinant human interleukin 2 (rhIL-2; Cat. No. 200-02, PeproTech, Rocky Hill, N.J.). The cells were then cultured for an additional 2-3 weeks in SCGM in the presence of 500 IU/mL rhIL-2. NK/T cells cultured for 2-4 weeks were used in experiments.

[1105] To test the adenosine-mediated inhibition of NK/T cells proliferation, NK/T cells (10,000 cells/well) were plated in a 96 well white plate with clear bottoms in 200 μL volume. The cells were treated with 20 μL adenosine (SKU No. A925, Sigma Aldrich) at concentrations resulting from a 3-fold dilution series starting at 1 mM, i.e. 1 mM, 300 μM, 100 μM, 30 μM, 10 μM, 3 μM, 1 μM, 0.3 μM and 0.1 μM. The NK/T cells were allowed to grow for 5 days in a humidified tissue culture incubator at 37° C. with 5% CO₂. After 5 days of treatment, the cells were centrifuged in a 96 well plate at 12,000 rpm for 5 min. 100 μL of medium was removed from each well of cells, followed by addition of 100 μL of Cell Titer Glow (CTG) reagent (Cat. No. G7570, Promega, Madison, Wis.) and incubated at room temperature for 15 min before measuring luminescence on the SpectraMax M3 plate reader according to the manufacturer's instructions. The mean cell survival (%) was determined by comparison of the measured luminescence to control cells not treated with adenosine.

[1106] The results are set forth in Table 15. The results showed that treatment of the NK/T cells with adenosine for 5 days resulted in a dose-dependent adenosine inhibition of NK/T cells proliferation. The IC₅₀, the concentration of adenosine where the response is reduced by half, was 16.2 μM.

TABLE 15
Adenosine-mediated inhibition of NK/T proliferation

| Adenosine | Mean Cell | |
|---|---|---|
| Concentration | Survival | Standard |
| (μM) | (%) | Deviation |
| 1000 | 15.82 | 0.44 |
| 300 | 13.65 | 1.04 |
| 100 | 26.01 | 1.51 |
| 30 | 36.84 | 0.96 |
| 10 | 70.33 | 1.33 |
| 3 | 110.07 | 2.07 |
| 1 | 121.11 | 1.8 |
| 0.3 | 101.19 | 1.14 |
| 0.1 | 106.67 | 1.21 |

[1107] B. Assessing Effects of ADA2 on Adenosine-Mediated Inhibition of Proliferation of NK/T Cells

[1108] rHuADA2 was tested to assess whether it can reverse the adenosine-mediated inhibition of NK/T cell proliferation at 1 mM adenosine. NK/T cells (10,000 cells/well) were plated in 96 well white plates with clear bottoms in a total volume of 180 μL. The cells were treated with 20 μL rHuADA2 at concentrations resulting from 3-fold dilution series, to give a final rHuADA2 concentration of 100 nM, 30 nM, 10 nM, 3 nM, 1 nM, 0.3 nM, 0.1 nM, and 0.03 nm, and then each well also was treated with 20 μL of adenosine at 1 mM. After treatment, the NK/T cells were cultured, processed and luminescence measured as described above. The mean cell survival (%) was determined by comparison of the measured luminescence to control cells not treated with adenosine or rHuADA2.

[1109] The results are set forth in Table 16. The results showed that rHuADA2 rescued the adenosine-mediated inhibition of NK/T cell proliferation, in a dose-dependent manner. The EC₅₀, the concentration of rHuADA2 that induces a response halfway between the baseline and maximum, was 8.5 nM.

TABLE 16
ADA2 rescue of adenosine-mediated
proliferation inhibition (1 mM adenosine)

| | | Mean cell | |
|---|---|---|---|
| rHuADA2 | | survival | Standard |
| Conc (nM) | | (%) | Deviation |
| 100 | nM | 120.6 | 2.76 |
| 30 | nM | 105.5 | 2.86 |
| 10 | nM | 83.82 | 2.17 |
| 3 | nM | 41.98 | 0.9 |
| 1 | nM | 25.73 | 0.3 |
| 0.3 | nM | 18.33 | 0.12 |
| 0.1 | nM | 18.4 | 0.72 |
| 0.03 | nM | 16.03 | 0.47 |

[1110] Experiments also were performed to assess the effect of rHuADA2 to reverse adenosine-mediated inhibition of NK/T cell proliferation at various concentrations of adenosine. The experiments were conducted in a similar manner as described above, with final adenosine concentration of 1 mM, 100, 50, or 25 μM and final rHuADA2 concentration of 100 nM, 30 nM, 10 nM, 3 nM, 1 nM, 0.3 nM, 0.1 nM, and 0.03 nM.

[1111] The results are set forth in Table 17. Similar to the results above, a dose-dependent rescue of NK/T cells proliferation by rHuADA2 was observed at varying adenosine concentrations. The EC₅₀ values for rHuADA2 at different fixed concentrations of adenosine is set forth in Table 18. The results show that adenosine inhibits NK/T cells proliferation and that the addition of rHuADA2 can rescue human NK/T cells from the adenosine-mediated inhibition of proliferation.

TABLE 17
ADA2 rescue of adenosine-mediated proliferation
inhibition at varying adenosine and ADA2 concentrations

| | | 1 mM | | 100 μM | | 50 μM | | 25 μM | |
|---|---|---|---|---|---|---|---|---|---|
| ADA2 | | Adenosine | | Adenosine | | Adenosine | | Adenosine | |
| (nM) | | MS % | SD | MS % | SD | MS % | SD | MS % | SD |
| 100 | nM | 96.3 | 1.2 | 109 | 2.3 | 116.9 | 1.5 | 120.6 | 2.5 |
| 30 | nM | 79.1 | 1.5 | 114.4 | 2.6 | 114.7 | 2.3 | 117.2 | 1.3 |
| 10 | nM | 67.1 | 1.4 | 108.3 | 2.1 | 105.9 | 1.2 | 121.2 | 1.1 |
| 3 | nM | 41.4 | 1 | 91.6 | 2.3 | 94 | 0.9 | 107.4 | 1.1 |
| 1 | nM | 22.6 | 0.5 | 71.7 | 1.7 | 80.2 | 0.6 | 99.3 | 1.5 |
| 0.3 | nM | 18.3 | 0.1 | 57.8 | 0.7 | 64.8 | 0.8 | 90.5 | 1 |
| 0.1 | nM | 16.3 | 0.2 | 43.8 | 0.8 | 76.6 | 0.9 | 89.6 | 0.9 |
| 0.03 | nM | 15.6 | 0.2 | 45.9 | 1.6 | 71.2 | 0.5 | 81.7 | 1 |

MS % = mean survival (%)
SD-standard deviation

TABLE 18
EC₅₀ values for ADA2 and various concentrations of Adenosine

| Adenosine Concentration | | EC₅₀ for rHuADA2 |
|---|---|---|
| 1 | mM | 7.2 nM |
| 100 | μM | 1.5 nM |
| 50 | μM | 3.8 nM |
| 25 | μM | 1.5 nM |

### Example 7

### Identification of ADA2 Heparin Binding Site Variants that Exhibit Reduced Heparin Binding

[1112] Selected candidate variants described in Table 7 above, that have an amino acid substitution in a residue that involved in heparin binding, were screened to assess if any exhibit attenuated heparin binding. Table 19 lists the variants that were tested. Heparin binding was assessed using heparin-affinity chromatography and/or using an enzyme-linked immunosorbent assay (ELISA). In addition, the adenosine deaminase activity of variants also was assessed. To perform the experiments, purified WT rHuADA2 and tested variants were prepared at 0.3 mg/mL concentration to normalize the amount of protein in each experiment.

[1113] A. Heparin Binding

[1114] 1. Heparin-Affinity Chromatography

[1115] To assess binding of variants to heparin, heparin-affinity chromatography was employed to identify heparin-bound variants. Heparin binding was tested by mixing 35 μL of rHuADA2 WT and variants with 20 μL heparin-Sepharose™ resin (GE Healthcare, Pittsburgh, Pa.; Cat. No. 17-0998-01), followed by incubating at room temperature for 30 min. The mixture was then centrifuged through a 0.22 μm centrifuge filter and the flow-through, containing the unbound protein, was collected for analysis on an SDS-PAGE gel. 35 μL of 1.5 M NaCl was added to heparin-Sepharose resin and incubated at room temperature (RT) for 10 min to elute the remaining heparin-bound protein from the heparin-Sepharose Samples of purified WT rHuADA2 and tested variants, before and after mixing with the heparin-Sepharose resin, were analyzed by SDS-PAGE to compare the degree of heparin binding.

[1116] The results are set forth in Table 19. The results show that a reduced elution of protein was achieved for 16 out of the 25 tested variants, indicating that these variants exhibit attenuated heparin binding compared to WT rHuADA2. The other variants exhibited elution similar to WT rHuADA2.

TABLE 19
Heparin Column Binding of ADA2 HBP variants

| Substitution | Substitution | Heparin |
|---|---|---|
| (Zavialov | (mature | Column |
| numbering) | numbering) | Binding |
| K14A | K11A | Similar to WT |
| K14D | K11D | Similar to WT |
| K14E | K11E | Similar to WT |
| K16A | K13A | Similar to WT |
| K16D | K13D | Similar to WT |
| K16E | K13E | Similar to WT |
| K374A | K371A | Reduced |
| K374D | K371D | Reduced |
| K374E | K371E | Reduced |
| K375A | K372A | Reduced |
| K375D | K372D | Reduced |
| K375E | K372E | Reduced |
| K455A | K452A | Similar to WT |
| K455D | K452D | Similar to WT |
| K455E | K452E | Reduced |
| R23A | R20A | Reduced |
| R23D | R20D | Reduced |
| R23E | R20E | Reduced |
| R369A | R366A | Reduced |
| R369D | R366D | Reduced |
| R369E | R366E | Reduced |
| K14A/R23A | K11A/R20A | Reduced |
| K14A/R23A/K374A | K11A/R20A/K371A | Reduced |
| R23A/K374A | R20A/K371A | Reduced |
| K14A/K374A | K11A/K371A | Reduced |

[1117] 2. ELISA Assay for Heparin Binding Property

[1118] An enzyme-linked immunosorbent assay (ELISA) using a heparin coated microtiter plate was performed to confirm the attenuated heparin binding properties of the rHuADA2 HBP variants screened above. A 96-well plate was coated with 100 μL of 200 μg/mL heparin sodium salt (Calibochem, EMD Millipore, Billerica, Mass.; Cat. No. 375095) in Na₂CO₃ buffer (pH 9.6), overnight at 4° C. The wells were blocked with 5% milk in PBS, and washed 6 times with PBS. 3 μM of select rHuADA2 variants (see Table 20), WT rHuADA2 (positive control) and WT rHuADA1 (negative control) were added to the wells individually and incubated for 2 hours at room temperature, followed by washing 6 times with PBS. 100 μL of 1:1000 diluted horseradish peroxidase (HRP)-anti-FLAG antibody (Abcam, Cambridge, UK; Cat. No. Ab1238) was added to the wells to detect binding and incubated at room temperature for 1 hour. The ELISA reactions were developed by adding the 3,3′,5,5′-Tetramethylbenzidine (TMB) substrate solution (Pierce, Thermo Fisher Scientific, Rockford, Ill.) according the manufacturer's instructions and reading the optical density at 450 nm (OD₄₅₀) on a plate reader.

[1119] The results are set forth in Table 20, which sets forth the average OD₄₅₀ reading and the standard deviation (Stdev) for tested variants. The results showed that WT ADA2 had the highest measured OD of any tested protein indicating binding to heparin, while the negative control ADA1 did not result in a detectable signal. The results showed that all tested variants, which are variants identified above that exhibit reduced binding to heparin, exhibit a lower measured OD reading than WT ADA2 and hence reduced binding to heparin-coated plates. Hence, consistent with the results above, the results showed attenuated binding to heparin, compared to wild-type human rHuADA2.

TABLE 20
Heparin Binding ELISA assay of selected ADA2 HBP variants

| | Substitution | Substitution | | |
|---|---|---|---|---|
| | (Zavialov | (mature | Average | |
| | numbering) | numbering) | OD₄₅₀ | Stdev |
| Set 1 | K374D | K371D | 0.15 | 0.02 |
| | K374E | K371E | 0.11 | 0.01 |
| | K375D | K372D | 0.2 | 0.07 |
| | K375E | K372E | 0.21 | 0.05 |
| | WT ADA2 | WT ADA2 | 0.49 | 0.02 |
| | WT ADA1 | WT ADA1 | 0.07 | 0.01 |
| Set 2 | K455E | K452E | 0.26 | 1 |
| | R23E | R20E | 0.2 | 0 |
| | R369E | R366E | 0.18 | 0.04 |
| | R23A/R374A | R20A/R371A | 0.17 | 0.08 |
| | WT ADA2 | WT ADA2 | 0.55 | 0.15 |
| | WT ADA1 | WT ADA1 | 0.06 | 0.01 |

[1120] B. Adenosine Deaminase Activity Assay

[1121] Adenosine deaminase activity of WT rHuADA2 and variants tested above were determined using the adenosine deaminase activity (ADA) assay described in Example 4. Activity was assessed on purified rHuADA2 WT and variants that were diluted to 5 g/mL, and then serially diluted 2 fold to generate 4 measurements.

[1122] Table 21 sets forth the results. The last column sets forth the relative enzymatic activity (0 activity vs. WT) compared to the rHuADA2 WT.

[1123] The results show that most variants that exhibit reduced heparin binding exhibit either similar or increased adenosine deaminase activity compared to WT ADA2. In particular, variants R23E, K374D, K374E, K375D, K375E, K455D, K455E, and R369E by Zavialov numbering (R2E, K371D, K371E, K372D, K372E, K452D, K452E and R366E, respectively, by mature numbering) not only show attenuated heparin binding, but also exhibit improved enzymatic activity.

[1124] In contrast, variants R23A, R23D and R369A (R20A, R20D and R366A, respectively, by mature numbering) exhibit reduced heparin binding, but also exhibit reduced adenosine deaminase activity.

[1125] The results show that K14E variant (K11E by mature numbering) and K455D variant (K452D by mature numbering) exhibit improved enzymatic activity relative to the WT rHuADA2, while the heparin binding property was not attenuated.

TABLE 21
Adenosine Deaminase Activity of ADA2 variants

| Substitution | Substitution | | | | % |
|---|---|---|---|---|---|
| (Zavialov | (mature | ΔA/ | mU/ | | activity |
| numbering) | numbering) | min | mL | stdev | vs. WT |
| K14A | K11A | 4.9 | 11.4 | 1.2 | 14.6 |
| K14D | K11D | 8.1 | 18.7 | 0.2 | 24 |
| K14E | K11E | 38.8 | 89.1 | 2.8 | 114.2 |
| K16A | K13A | 12.2 | 28 | 1.8 | 35.9 |
| K16D | K13D | 29.3 | 67.3 | 18.1 | 86.3 |
| K16E | K13E | 7.1 | 16.3 | 2.4 | 20.9 |
| K374A | K371A | 25.8 | 59.2 | 16.3 | 75.9 |
| K374D | K371D | 117.3 | 269.8 | 6.4 | 345.9 |
| K374E | K371E | 136.5 | 313.8 | 17 | 402.3 |
| K375A | K372A | 35.5 | 81.8 | 15.4 | 104.8 |
| K375D | K372D | 53.7 | 123.5 | 10.9 | 158.3 |
| K375E | K372E | 47 | 108.1 | 10 | 138.6 |
| K455A | K452A | 6.1 | 14 | 2.8 | 18 |
| K455D | K452D | 42.6 | 97.9 | 12.6 | 125.5 |
| K455E | K452E | 55.4 | 127.3 | 6.1 | 163.2 |
| R23A | R20A | 23.2 | 53.3 | 4.8 | 68.4 |
| R23D | R20D | 6.9 | 15.9 | 4.2 | 20.3 |
| R23E | R20E | 70.2 | 161.6 | 26.3 | 207.1 |
| R369A | R366A | 14.9 | 34.3 | 5.5 | 44 |
| R369D | R366D | 34.9 | 80.2 | 3.6 | 102.8 |
| R369E | R366E | 50.4 | 115.9 | 28.9 | 148.5 |
| K14A/R23A | K11A/R20A | 42.1 | 96.9 | 0.7 | 124.2 |
| K14A/R23A/K374A | K11A/R20A/K371A | 31.7 | 72.8 | 10.1 | 93.3 |
| R23A/K374A | R20A/K371A | 51.1 | 117.6 | 7.1 | 150.7 |
| K14A/K374A | K11A/K371A | 34.1 | 78.4 | 2.2 | 100.5 |
| WT ADA2 | WT ADA2 | 33.9 | 78 | 1.2 | 100 |

### Example 8

### Pegylation of rHuADA2 and Assessment of Adenosine Deaminase Activity and Heparin Binding

[1126] rHuADA2, K374D-ADA2 variant (K371D by mature numbering) or R23E-ADA2 variant (R20E by mature numbering) were PEGylated on surface exposed lysines by reaction with linear PEG-20K. The PEGylated-rHuADA2 or variants were assessed for heparin binding and adenosine deaminase activity.

[1127] A. PEGylation

[1128] To PEGylate the enzyme, 3 mg/mL WT rHuADA2, rHuADA2-K374D (K371D by mature numbering) or rHuADA2-R23E (R20E by mature numbering) variants were each individually mixed with linear PEG-20K (JenKem Technology, Plano, Tex.; Cat. No. M-SCM-20K) at 1:15 molar ratio and incubated at 4° C. for 16 hours. The reaction mixture was centrifuged through a 0.22 μm centrifuge filter and the flow-through containing the PEGylated enzyme was collected.

[1129] The extent of PEGylation was assessed by SDS-PAGE analysis. The results show that at least 80% of the WT rHuADA2, rHuADA2-K374D (K371D by mature numbering), and rHuADA2-R23E (R20E by mature numbering) were PEGylated under the reaction conditions, as indicated by a decrease in intensity of the unmodified rHuADA2 band accompanied by the appearance of multiple larger bands representing the PEGylated rHuADA2 molecules.

[1130] B. Heparin Binding ELISA

[1131] Heparin binding of PEGylated rHuADA2 or variants was assessed by capture ELISA. Binding of rHuADA1 was assessed as a negative control. 100 μL of 0.2 mg/mL biotin-heparin (Sigma-Aldrich, St. Louis, Mo.; Cat No. B9806-10MG) was added to a streptavidin coated 96-well plate (Thermo Fisher Scientific, Rockford, Ill.; Cat. No. 15520), and incubated at room temperature for 1 hour. The plate was washed 6 times with PBS. Then, 150 μL of 1 μM PEGylated rHuADA2 was added to the heparin coated plate, titrated in 3×serial dilutions, and incubated at room temperature for 2 hours. The plate was then washed 6 times with PBS. A 1000×dilution of goat HRP-anti-FLAG pAb (Abcam, Cambridge, UK; Cat. No. Ab1238) was added to the ELISA plate and incubated at room temperature for 1 hour. The ELISA plate was then washed 6 times with phosphate buffered saline with Tween (PBST) and developed with the 3,3′,5,5′-Tetramethylbenzidine (TMB) substrate solution (Pierce, Thermo Fisher Scientific, Rockford, Ill.) according the manufacturer's instructions and reading the optical density at 450 nm (OD₄₅₀) on a plate reader.

[1132] Table 22 sets forth the average OD₄₅₀ reading and the standard deviation (Stdev) from the heparin binding capture ELISA assay of PEGylated rHuADA2 wild-type and variants. The results show that PEGylated rHuADA2 and variants have a significant reduction in heparin binding. For PEGylated rHuADA2-K374D (K371D by mature numbering) and rHuADA2-R23E (R20E by mature numbering) variants, PEGylation conferred additional reduction in heparin binding property compared to the non-PEGylated forms with reduced heparin binding. Thus, these results indicate that modification of the rHuADA2 protein with the PEG moiety reduces heparin binding by steric blockade and/or alteration of electrostatic charges on the surface of rHuADA2.

TABLE 22
Heparin Binding ELISA assay of
PEGylated ADA2 WT and variants

| Variant | Variant | | |
|---|---|---|---|
| (Zavialov | (mature | Average | |
| numbering) | numbering) | OD₄₅₀ | Stdev |
| K374D | K371D | 0.87 | 0.03 |
| PEG-K374D | PEG-K371D | 0.15 | 0.05 |
| R23E | R20E | 0.71 | 0.04 |
| PEG-R23E | PEG-R20E | 0.55 | 0.02 |
| WT ADA2 | WT ADA2 | 2.31 | 0.01 |
| PEG-WT ADA2 | PEG-WT ADA2 | 0.75 | 0.04 |
| WT ADA1 | WT ADA1 | −0.02 | 0 |

[1133] C. Adenosine Deaminase Activity Assay

[1134] Adenosine deaminase activity of PEGylated rHuADA2 and variants was assessed using the method described in Example 4, and compared to the activity of the corresponding non-PEGylated form.

[1135] The results are set forth in Table 23. The results show that PEGylated WT rHuADA2 had comparable adenosine deaminase activity compared to the non-PEGylated form. Similarly, the PEGylated rHuADA2-K374D (K371D by mature numbering) and rHuADA2-R23E (R20E by mature numbering) variants also showed comparable adenosine deaminase activity compared to the non-PEGylated forms. Although WT rHuADA2 contains 32 lysine residues as a monomer, and 64 lysine residues as a dimer, PEGylation at the lysine residues had no impact on the adenosine deaminase activity of rHuADA2.

TABLE 23
Adenosine Deaminase Activity of
PEGylated ADA2 WT and variants

| Variant | Variant | | | |
|---|---|---|---|---|
| (Zavialov | (mature | | | % of |
| numbering) | numbering) | mU/mL | stdev | WT |
| K374D | K371D | 162.9 | 2.2 | 134 |
| R23E | R20E | 129.9 | 0.4 | 106.8 |
| WT | WT | 121.6 | 2.3 | 100 |
| PEG-K374D | PEG-K371D | 142 | 7.1 | 116.8 |
| PEG-R23E | PEG-R20E | 115.6 | 3.9 | 95.1 |
| PEG-WT | PEG-WT | 124.2 | 5.5 | 102.2 |

[1136] D. Conclusion

[1137] The results of the experiments demonstrate that PEGylation of rHuADA2 variants reduces heparin binding in addition to the attenuated heparin binding resulting from the amino acid substitution, but without loss of adenosine deaminase activity. Thus, the results show that PEGylation of heparin-binding variants can improve the pharmacokinetic properties of the rHuADA2 variants without affecting the adenosine deaminase activity. PEGylation can be used in place of mutation to attenuate heparin binding.

### Example 9

### In Vivo Pharmacokinetic Analysis of rHuADA2, ADA2 Variants, and Pegylated Forms

[1138] The pharmacokinetics (PK) of non-PEGylated and PEGylated forms of WT rHuADA2, ADA2-K374D and ADA2-R23E variants by Zavialov numbering (K371D and R20E, respectively, by mature numbering) were analyzed in an immunocompetent mouse model.

[1139] A. Study Design

[1140] Fifty four (54) male BALB/c mice were divided into six (6) dosing groups, and were further divided into three (3) groups each for sampling of blood at different time points. Thus, the mice were randomized into eighteen (18) groups total. Mice were weighed prior to the start of the study, and randomized into the 18 groups based upon their body weights. In each sampling group, three groups of (3) mice were used for dosing each test article to prevent oversampling of the blood from the animals. For measurement of baseline ADA2 levels, a blood sample was obtained from 12 randomly chosen mice and plasma was prepared using the anti-coagulant potassium (K₃) ethylene diamine tetraacetic acid (K₃-EDTA). All blood was collected by submandibular venipuncture.

[1141] Each mouse was injected by intravenous tail-vein injection with a 7.5 mg/kg dose of one of six ADA2 test article as set forth in in Table 24, i.e. rHuADA2-K374D (K371D by mature numbering), PEG-rHuADA2-K374D (PEG-K371D by mature numbering), rHuADA2-R23E (R20E by mature numbering), PEG-rHuADA2-R23E (PEG-R20E by mature numbering), or WTADA2 and PEG-WT ADA2. PEGylated ADA2a variants were prepared using the PEGylation method as described in Example 8.A. The concentration of each test article was 1.5 mg/mL, which resulted in a dose volume range from 93-119 μL depending on the body weight (BW) of the mouse. Dose volumes and body weights for individual animals are provided in Table 25.

[1142] Blood was collected at designated sampling time points from appropriate groups of mice as indicated below in Table 24 and kept on ice until plasma preparation. Plasma was prepared by centrifuging the blood (500×g for 5 min at 4° C.), transferring the plasma to a fresh tube and immediately freezing at −80° C. until the adenosine deaminase activity assay. Adenosine deaminase activity was determined as described in Example 4. The half-life, or time taken for the activity of ADA2 proteins to be reduced by half, was calculated. Also, total exposure was measured by calculating the Area Under the Concentration-time Curve (AUC).

TABLE 24
Pharmacokinetics Study Design for
PEGylated ADA2 WT and variants

| | | | | | Blood |
|---|---|---|---|---|---|
| | | | | | Collection |
| | | | | | Time points |
| | Test Article | | No. of | | post dosing |
| Group # | (ZavialoNo.) | (Mature No.) | Animals | Dose | (hours) |
| 1 | K374D | K371D | 3 | 7.5 mg/kg | 0.25, 2 |
| 2 | | | 3 | | 1, 8 |
| 3 | | | 3 | | 4, 24 |
| 4 | PEG-K374D | PEG-K371D | 3 | 7.5 mg/kg | 0.25, 2 |
| 5 | | | 3 | | 1, 8 |
| 6 | | | 3 | | 4, 24 |
| 7 | R23E | R20E | 3 | 7.5 mg/kg | 0.25, 2 |
| 8 | | | 3 | | 1, 8 |
| 9 | | | 3 | | 4, 24 |
| 10 | PEG-R23E | PEG-R20E | 3 | 7.5 mg/kg | 0.25, 2 |
| 11 | | | 3 | | 1, 8 |
| 12 | | | 3 | | 4, 24 |
| 13 | WT ADA2 | WT ADA2 | 3 | 7.5 mg/kg | 0.25, 2 |
| 14 | | | 3 | | 1, 8 |
| 15 | | | 3 | | 4, 24 |
| 16 | PEG-WT | PEG-WT | 3 | 7.5 mg/kg | 0.25, 2 |
| 17 | ADA2 | ADA2 | 3 | | 1, 8 |
| 18 | | | 3 | | 4, 24 |

TABLE 25
Body weight and dosing for pharmacokinetics
analysis of PEGylated ADA2 WT and variants

| Test Article | | | | | mg of | |
|---|---|---|---|---|---|---|
| (Zavialov | (Mature | | Animal | | test | vol |
| numbering) | numbering) | Group # | ID # | BW | article | (μL) |
| K374D | K371D | 1 | 817 | 17.7 | 0.1328 | 89 |
| | | | 850 | 21 | 0.1575 | 105 |
| | | | 832 | 23.7 | 0.1778 | 119 |
| | | 2 | 822 | 18.6 | 0.1395 | 93 |
| | | | 830 | 21 | 0.1575 | 105 |
| | | | 819 | 23.7 | 0.1778 | 119 |
| | | 3 | 821 | 18.9 | 0.1418 | 95 |
| | | | 812 | 21.1 | 0.1583 | 106 |
| | | | 844 | 23.3 | 0.1748 | 117 |
| PEG-K374D | PEG-K371D | 4 | 823 | 19.2 | 0.144 | 96 |
| | | | 801 | 20.9 | 0.1568 | 105 |
| | | | 848 | 22.8 | 0.171 | 114 |
| | | 5 | 841 | 19.3 | 0.1448 | 97 |
| | | | 836 | 21.1 | 0.1583 | 106 |
| | | | 837 | 22.8 | 0.171 | 114 |
| | | 6 | 826 | 19.7 | 0.1478 | 99 |
| | | | 835 | 20.8 | 0.156 | 104 |
| | | | 853 | 22.6 | 0.1695 | 113 |
| R23E | R20E | 7 | 828 | 19.8 | 0.1485 | 99 |
| | | | 807 | 21.2 | 0.159 | 106 |
| | | | 834 | 22.4 | 0.168 | 112 |
| | | 8 | 820 | 19.9 | 0.1493 | 100 |
| | | | 840 | 20.7 | 0.1553 | 104 |
| | | | 839 | 22.3 | 0.1673 | 112 |
| | | 9 | 810 | 20 | 0.15 | 100 |
| | | | 809 | 21.2 | 0.159 | 106 |
| | | | 842 | 22.2 | 0.1665 | 111 |
| PEG-R23E | PEG-R20E | 10 | 815 | 20 | 0.15 | 100 |
| | | | 813 | 20.6 | 0.1545 | 103 |
| | | | 827 | 22.2 | 0.1665 | 111 |
| | | 11 | 824 | 20 | 0.15 | 100 |
| | | | 852 | 21.2 | 0.159 | 106 |
| | | | 833 | 22.1 | 0.1658 | 111 |
| | | 12 | 825 | 20 | 0.15 | 100 |
| | | | 808 | 20.6 | 0.1545 | 103 |
| | | | 845 | 22 | 0.165 | 110 |
| WT ADA2 | WT ADA2 | 13 | 838 | 20 | 0.15 | 100 |
| | | | 818 | 21.3 | 0.1598 | 107 |
| | | | 843 | 21.9 | 0.1643 | 110 |
| | | 14 | 846 | 20 | 0.15 | 100 |
| | | | 814 | 20.5 | 0.1538 | 103 |
| | | | 805 | 21.8 | 0.1635 | 109 |
| | | 15 | 849 | 20 | 0.15 | 100 |
| | | | 851 | 21.3 | 0.1598 | 107 |
| | | | 803 | 21.8 | 0.1635 | 109 |
| PEG-WT | PEG-WT | 16 | 811 | 20.2 | 0.1515 | 101 |
| ADA2 | ADA2 | | 829 | 20.4 | 0.153 | 102 |
| | | | 831 | 21.7 | 0.1628 | 109 |
| | | 17 | 802 | 20.3 | 0.1523 | 102 |
| | | | 854 | 21.4 | 0.1605 | 107 |
| | | | 804 | 21.7 | 0.1628 | 109 |
| | | 18 | 806 | 20.3 | 0.1523 | 102 |
| | | | 847 | 20.3 | 0.1523 | 102 |
| | | | 816 | 21.5 | 0.1613 | 108 |

[1143] B. Results

[1144] 1. Pharmacokinetics of Non-PEGylated rHuADA2 WT and Variants

[1145] The pharmacokinetics (PK) properties of WT rHuADA2 compared to variants ADA2-K374D and ADA2-R23E by Zavialov numbering (K371D and R20E, respectively, by mature numbering) are set forth in Tables 26 and 27. Table 26 sets forth the total exposure measured using an Area Under the Curve (AUC) calculation and Table 27 sets forth the half-life (t_{1/2}). The results show that each of the variants exhibited improved pharmacokinetic parameters compared to the wildtype ADA2. For example, variant rHuADA2-R23E (R20E by mature numbering) exhibited an AUC that was 190 higher than for WT rHuADA2 and a half-life that was 119% longer than WT rHuADA2. Variant rHuADA2-K374D, exhibited an AUC that was 12800 higher than for WT rHuADA2 and a half-life that was 230% longer than for WT rHuADA2.

TABLE 26
Comparison of Total Exposure-Area under
the Curve (AUC): ADA2 WT and HBP variants

| Test Article | Test article | | Percent increase in |
|---|---|---|---|
| (Zavialov | (Mature | AUC | AUC compared |
| numbering) | numbering) | (mU*h)/mL | to WT ADA2 |
| WT | WT | 32,883 | — |
| R23E | R20E | 39,033 | 19 |
| K374D | K371D | 74,983 | 128 |

TABLE 27
Comparison of half-life (t_{1/2}): ADA2 WT and HBP variants

| Test Article | Test article | Half life | Percent increase in |
|---|---|---|---|
| (Zavialov | (Mature | slow (t_{1/2}) | t_{1/2} compared |
| numbering) | numbering) | (min) | to WT ADA2 |
| WT | WT | 69 | — |
| R23E | R20E | 151 | 119 |
| K374D | K371D | 228 | 230 |

[1146] 2. Pharmacokinetics of PEGylated rHuADA2 WT and Variants

[1147] The pharmacokinetics (PK) properties of native and PEGylated WT rHuADA2 compared to PEGylated forms of variants, PEG-R23E (R20E by mature numbering) and PEG-K374D (K371D by mature numbering), are set forth in Tables 28 and 29. Table 28 sets forth the total exposure measured using an Area Under the Curve (AUC) calculation and Table 29 sets forth the half-life (t_{1/2}).

[1148] For wildtype ADA2, the results show that PEGylation substantially improves the pharmacokinetic profile. The results show that PEG-WT ADA2 exhibits an AUC that was 42910% higher than the non-PEGylated WT ADA2 and a half-life that was 1078% longer than the non-PEGylated WT ADA2. Likewise, PEGylation of the variant forms also resulted in improved pharmacokinetics compared to non-PEGylated forms. Thus, for both of the PK components measured, AUC and t_{1/2}, PEGylation led to improved PK values compared to the non-PEGylated forms.

[1149] The results also show that that the PEGylated forms of ADA2 variants also exhibit improvements in one or both PK components compared to PEG-WT ADA2, although these improvements were greater for the variant PEG-K374D (K371D by mature numbering) than for PEG-R23E (R20E by mature numbering). For example, PEG-R23E (R20E by mature numbering), exhibited an AUC that was 4271% higher (compared to 4291% for PEG-WT ADA2) than the non-PEGylated WT ADA2 and a half-life that was 1420% longer (compared to 1078% for PEG-WT ADA2) than the non-PEGylated WT ADA2. In contrast, PEG-K374D (K371D by mature numbering), exhibited an AUC that was 8187% higher (compared to 42910% for PEG-WT ADA2) than the non-PEGylated WT ADA2 and a half-life that was 179I % longer (compared to 1078% for PEG-WT ADA2) than the non-PEGylated WT ADA2.

TABLE 28
Comparison of Total Exposure-Area under the
Curve (AUC): PEGylated ADA2 WT and HBP variants

| Test Article | Test article | | Percent increase in |
|---|---|---|---|
| (Zavialov | (Mature | AUC | AUC compared |
| numbering) | numbering) | (mU*h)/mL | to WT ADA2 |
| WT ADA2 | WT ADA2 | 32,883 | — |
| PEG-WT ADA2 | PEG-WT ADA2 | 1,444,000 | 4291 |
| PEG-R23E | PEG-R20E | 1,437,333 | 4271 |
| PEG-K374D | PEG-K371D | 2,725,000 | 8187 |

TABLE 29
Comparison of half-life (t_{1/2}):
PEGylated ADA2 WT and HBP variants

| Test Article | Test article | Half life | Percent increase in |
|---|---|---|---|
| (Zavialov | (Mature | slow (t_{1/2}) | t_{1/2} compared |
| numbering) | numbering) | (min) | to WT ADA2 |
| WT ADA2 | WT ADA2 | 69 | — |
| PEG-WT ADA2 | PEG-WT ADA2 | 813 | 1078 |
| PEG-R23E | PEG-R20E | 1049 | 1420 |
| PEG-K374D | PEG-K371D | 1305 | 1791 |

### Example 10

### Identification of ADA2 Active Site Variants with Increased Enzymatic Activity

[1150] Selected candidate variants described in Table 8 above, containing an amino acid substitution in a residue that play a role in enzymatic activity, were assessed for their adenosine deaminase activity using the method described in Example 4. Table 30 lists the variants that were tested. To perform the experiments, purified WT rHuADA2 and tested variants were prepared at 5 μg/mL concentration to normalize the amount of protein in each experiment.

[1151] The results of the adenosine deaminase activity assay are set forth in Table 30 below. The percent (%) activity of each variant compared to WT-ADA2 is indicated. The results show that the activity of all tested variants containing a substitution at position 182 (position 179 by mature numbering) was substantially reduced, indicating that the glutamic acid (E) residue is important for enzymatic activity.

[1152] In contrast, other substitutions retain or exhibit increased enzymatic activity. In particular, identified variants with increased activity included: R222Q variant (R219Q by mature numbering) with 170% activity of WT, H267Q variant (H264Q by mature numbering) with 114% activity of WT, H267G (H264G by mature numbering) with 153% activity of WT, R222K (R219K by mature numbering) with 152% activity of WT, L224A (L221A by mature numbering) with 128% activity of WT, L224V (L221V by mature numbering) with 123% activity of WT, L224G (L221G by mature numbering) with 113% activity of WT, and S265N (S262N by mature numbering) with 211% activity relative of WT.

TABLE 30
Adenosine deaminase activity of variants
designed for improved rHuADA2 activity

| Substitution | Substitution | | | | |
|---|---|---|---|---|---|
| (Zavialov | (mature | | | | % of WT |
| numbering) | numbering) | ΔA/min | mU/ml | std | activity |
| H267A | H264A | 30.8 | 70.9 | 8.6 | 91 |
| H267Q | H264Q | 38.8 | 89.3 | 16.2 | 114 |
| H267N | H264N | 21.9 | 50.4 | 8 | 65 |
| H267G | H264G | 51.8 | 119.1 | 10.9 | 153 |
| R222K | R219K | 51.5 | 118.5 | 6.9 | 152 |
| R222Q | R219Q | 57.8 | 132.9 | 11.6 | 170 |
| R222N | R219N | 35.4 | 81.5 | 10.7 | 104 |
| R222A | R219A | 13.6 | 31.2 | 5.7 | 40 |
| L224A | L221A | 43.5 | 100.1 | 10.9 | 128 |
| L224V | L221V | 41.8 | 96.1 | 13.3 | 123 |
| L224G | L221G | 38.3 | 88.2 | 1.6 | 113 |
| E182D | E179D | 7.8 | 18.1 | 2.1 | 23 |
| E182A | E179A | 3.7 | 8.6 | 0.8 | 11 |
| E182S | E179S | 4.1 | 9.5 | 0.1 | 12 |
| E182T | E179T | 2.7 | 6.2 | 0.2 | 8 |
| E182V | E179V | 3.5 | 8 | 0.7 | 10 |
| E182G | E179G | 3 | 6.9 | 0.7 | 9 |
| S265A | S262A | 20.5 | 47.1 | 2.5 | 60 |
| S265V | S262V | 28.8 | 66.1 | 6.8 | 85 |
| S265M | S262M | 35.5 | 81.6 | 3.4 | 105 |
| S265N | S262N | 71.7 | 164.8 | 21.4 | 211 |
| WT ADA2 | WT ADA2 | 33.9 | 78 | 1.2 | 100 |

### Example 11

### Generation of Combination Variants

[1153] Combinations variants were generated containing amino acid substitution(s) that increased enzymatic activity and that attenuated heparin binding. In particular, the amino acid substitution S265N and/or R222Q (S262N and/or R219Q, by mature numbering) which conferred the greatest increases in enzymatic activity as described in Example 10, were combined with one or more of amino acid substitutions K374D, K374E and/or R23E (K371D, K371E and/or R20E, respectively, by mature numbering) identified in Example 7. Variants were generated as described above in Example 1 using the QuikChange Lightning Multi Site-Directed Mutagenesis Kit. The generated combination variants are set forth in Table 31. The combination variants and corresponding single amino acid substitutions were assessed for kinetic parameters of adenosine deaminase activity and for heparin binding.

TABLE 31
Active Site and Attenuated Heparin Binding Combination Variants

| Substitution | Substitution | |
|---|---|---|
| (Zavialov | (mature | SEQ |
| numbering) | numbering) | ID NO: |
| S265N/K374D | S262N/K371D | 59 |
| S265N/K374E | S262N/K371E | 60 |
| S265N/R23E | S262N/R20E | 61 |
| S265N/R23E/K374D | S262N/R20E/K371D | 62 |
| S265N/R23E/K374E | S262N/R20E/K371E | 63 |
| R222Q/K374E | R219Q/K371E | 263 |
| R222Q/K374D | R219Q/K371D | 264 |
| R222Q/R23E | R219Q/R20E | 265 |
| R222Q/K374E/R23E | R219Q/K371E/R20E | 266 |
| R222Q/K374D/R23E | R219Q/K371D/R20E | 267 |
| R222Q/S265N/K374E | R219Q/S262N/K371E | 268 |
| R222Q/S265N/K374D | R219Q/S262N/K371D | 269 |
| R222Q/S265N/R23E | R219Q/S262N/R20E | 270 |
| R222Q/S265N/K374E/R23E | R219Q/S262N/K371E/R20E | 271 |
| R222Q/S265N/K374D/R23E | R219Q/S262N/K371D/R20E | 272 |
| R222Q/S265N | R219Q/S262N | 273 |

[1154] The combination variants containing the mutations S265N (S262N by mature numbering), set forth in SEQ ID NOS:59-63, and/or R222Q (R219Q by mature numbering), set forth in SEQ ID NOS:263-273, and corresponding single amino acid substitutions, were assessed for kinetic parameters of adenosine deaminase activity. The combination variants containing the mutation S265N (S262N by mature numbering), set forth in SEQ ID NOS: 59-63 and corresponding single amino acid substitutions, were assessed for heparin binding activities.

[1155] A. Kinetic Assessment of Adenosine Deaminase Activity

[1156] 1. Assay Method

[1157] Adenosine deaminase activity was determined by the measurement of ammonia released from adenosine when broken down to inosine. Ammonia was measured using a commercially available Ammonia Assay kit (Cat. No. AA0100, Sigma-Aldrich, St. Louis, Mo.). The kit contains dry reagents containing α-ketoglutaric acid and NADPH, which were reconstituted with 5 mL water prior to use in the assay. Ammonia reacts with α-ketogluaric acid (KGA) and reduced nicotinamide adenine dinucleotide phosphate (NADPH) in the presence of L-glutamate dehydrogenase (GDH). The decrease in absorbance at 340 nm, due to the oxidation of NADPH, is proportional to the ammonia concentration, and hence the adenosine deaminase activity.

[1158] Kinetics parameters of rHuADA2 WT and variants were compared using this assay at different adenosine concentrations at pH 7.6 and 6.5. Adenosine concentrations ranging from 20 μM to 20 mM were used. Sub-molar concentration of adenosine stock was prepared in 1N NaOH.

[1159] For the enzymatic assays at pH 7.6, adenosine was serially diluted with 100 mM sodium acetate (NaOAc), pH 4.9. A 2×reaction mixture was prepared, containing reconstituted ammonia assay reagent (containing about 4 mM α-ketoglutarate and about 300 μM NADPH), WT rHuADA2 or variants at 1 μg/mL (17 nM) and glutamate dehydrogenase (GDH, 1:50 dilution). 85 μL of adenosine was added to 85 μL 2×mixture in duplicate in a UV-transparent half-area plate. The change in absorbance (AA) at 340 nm over time at room temperature was monitored.

[1160] For the enzymatic assay at pH 6.5, adenosine was serially diluted with 200 mM piperazine-N,N′-bis(2-ethanesulfonic acid) (PIPES), pH 6.5. A 2×reaction mixture in 200 mM PIPES, pH 6.5 was prepared, containing 4 mM α-ketoglutarate, 300 μM NADPH, 1 μg/mL (17 nM) rHuADA2 or variants and 50 U/mL GDH (Cat No. G2626, Sigma-Aldrich). The enzymatic reaction was initiated by adding equal volume of adenosine to the 2×mixture in a UV-transparent half-area plate as described above, and the change in absorbance (AA) at 340 nm over time at room temperature was monitored.

[1161] Adenosine deaminase activity in mU/mL (μM/min equivalent) was calculated using the following formula:

1 mU/mL=−(−ΔA/min×Tᵥ)/(Sᵥ×ε×1)
[1162] where Tᵥ=total volume (170 μL), Sᵥ=sample volume (85 μL), ε=6.22×10⁻³ μM⁻¹ cm⁻¹, 1=1 cm.

[1163] The activity data were fitted with non-linear regression of Michaelis-Menten equation using Graphpad Prism software to obtain Kₘ and Vₘₐₓ. Other kinetics parameters such as k_{cat} and k_{cat}/Kₘ were also determined.

k_{cat}(1/s)=Vₘₐₓ/[E]₀

Vₘₐₓ unit=μM/min

[E]₀=8.5 nM or 0.0085μM

k_{cat}=Vₘₐₓ/0.0085/60

k_{cat}/Kₘ unit=1/Ms

[1164] 2. Results

[1165] Tables 32 and 33 set forth the kinetic parameters of the rHuADA2 wild-type and variants, at pH 7.6 and pH 6.5, respectively. The Kₘ of WT rHuADA2 was 5.25 mM at pH 7.6 and 3.66 mM at pH 6.5, and the catalytic efficiency (k_{cat}/Kₘ) of WT rHuADA2 was 9,753 at pH 7.6 and 17,060 at pH 6.5. Thus, these results show that WT rHuADA2 exhibits greater activity at pH 6.5. All tested variants exhibited improved enzyme kinetics compared to WT-ADA2. Generally, improved enzyme kinetics for the designed variants was observed more prominently at pH 6.5 than at pH 7.6.

[1166] For example, S265N (S262N by mature numbering) had significantly improved kinetics properties compared to the WT. Substitution of serine residue 265 (262 by mature numbering) to an asparagine at the active site of rHuADA2 lowered the Kₘ value to 3.02 mM at pH 7.6 and 1.49 mM at pH 6.5, and increased the catalytic efficiency (k_{cat}/Kₘ) from 9,753 to 52,208 (1/Ms) at pH 7.6, and from 17,060 to 60,339 (1/Ms) at pH 6.5. R222Q (R219Q by mature numbering) also had significantly improved kinetics properties compared to the WT. Substitution of lysine residue 222 (219 by mature numbering) to an glutamine lowered the Kₘ value to 1.92 mM at pH 7.6 and 0.994 mM at pH 6.5, and increased the catalytic efficiency (k_{cat}/Kₘ) from 9,753 to 60,697 (1/Ms) at pH 7.6, and from 17,060 to 83,146 (1/Ms) at pH 6.5.

[1167] The ADA2 variants K374D, K374E and R23E in Zavialov numbering (K371D, K371E and R20E, respectively, by mature numbering), identified as conferring attenuated heparin binding, also exhibited improved kinetics properties compared to WT, which was greater at pH 6.5. The combination variants containing S265N (S262N by mature numbering) further exhibited improved catalytic activity compared to WT. In particular, the combination variants S265N/K374E, S265N/R23E and S265N/R23E/K374E exhibited the greatest improvements in catalytic activity at pH 6.5 among the tested variants.

[1168] The results also show that combination variants containing R222Q (R219Q by mature numbering) have significantly improved kinetic properties compared to WT ADA2 and R222Q (R219Q by mature numbering). Among the tested ADA2 combination variants, double mutant R222Q/S265N (R219Q/S262N by mature numbering) exhibited the greatest improvement on kinetic properties, showing a 4.7-fold lower Kₘ and 15-fold higher catalytic efficiency (k_{cat}/Kₘ) at pH 7.6, and a 5.0-fold lower Kₘ and 8.2-fold higher catalytic efficiency (k_{cat}/Kₘ) at pH 6.5, compared to the WT ADA2. The results also show that ADA2 WT and all tested R222Q (R219Q by mature numbering) containing variants have lower Kₘ at pH 6.5 than that at pH 7.6.

TABLE 32
Kinetic parameters of ADA2 WT and variants at pH 7.6; [E] = 8.5 nM

| Replacement | Replacement | | | | |
|---|---|---|---|---|---|
| (Zavialov | (mature | Vmax | Kₘ | k_{cat} | k_{cat}/Kₘ |
| numbering) | numbering) | (μM/min) | (mM) | (1/s) | (1/Ms) |
| WT | WT | 26.09 | 5.25 | 51.16 | 9,753 |
| K374D | K371D | 28.25 | 4.88 | 55.39 | 11,349 |
| K374E | K371E | 35.13 | 4.77 | 68.88 | 14,438 |
| R23E | R20E | 29.08 | 5.06 | 57.02 | 11,275 |
| S265N | S262N | 80.49 | 3.02 | 157.82 | 52,208 |
| R222Q | R219Q | 59.28 | 1.92 | 116.24 | 60,697 |
| S265N/K374D | S262N/K371D | 78.29 | 2.86 | 153.51 | 53,637 |
| S265N/K374E | S262N/K371E | 87.44 | 2.54 | 171.45 | 67,554 |
| S265N/R23E | S262N/R20E | 63.13 | 2.9 | 123.78 | 42,743 |
| S265N/R23E/K374D | S262N/R20E/K371D | 72.78 | 3.13 | 142.71 | 45,564 |
| S265N/R23E/K374E | S262N/R20E/K371E | 82.38 | 2.87 | 161.53 | 56,262 |
| R222Q/K374E | R219Q/K371E | 87.27 | 1.58 | 171.12 | 108,508 |
| R222Q/K374D | R219Q/K371D | 77.01 | 1.71 | 151.00 | 88,252 |
| R222Q/R23E | R219Q/R20E | 84.71 | 1.46 | 166.10 | 114,078 |
| R222Q/K374E/R23E | R219Q/K371E/R20E | 78.42 | 1.92 | 153.76 | 80,086 |
| R222Q/K374D/R23E | R219Q/K371D/R20E | 88.43 | 1.34 | 173.39 | 129,687 |
| R222Q/S265N/K374E | R219Q/S262N/K371E | 65.43 | 1.35 | 128.29 | 95,103 |
| R222Q/S265N/K374D | R219Q/S262N/K371D | 70.96 | 1.19 | 139.14 | 117,218 |
| R222Q/S265N/R23E | R219Q/S262N/R20E | 67.24 | 1.29 | 131.84 | 102,602 |
| R222Q/S265N/ | R219Q/S262N/ | 90.91 | 1.24 | 178.25 | 143,407 |
| K374E/R23E | K371E/R20E | | | | |
| R222Q/S265N/ | R219Q/S262N/ | 72.58 | 1.23 | 142.31 | 115,514 |
| K374D/R23E | K371D/R20E | | | | |
| R222Q/S265N | R219Q/S262N | 87.79 | 1.10 | 172.14 | 157,203 |

TABLE 33
Kinetic parameters of ADA2 WT and variants at pH 6.5; [E] = 8.5 nM

| Replacement | Replacement | | | | |
|---|---|---|---|---|---|
| (Zavialov | (mature | Vmax | Kₘ | k_{cat} | k_{cat}/Kₘ |
| numbering) | numbering) | (μM/min) | (mM) | (1/s) | (1/Ms) |
| WT | WT | 31.81 | 3.66 | 62.37 | 17,060 |
| K374D | K371D | 42.98 | 3.16 | 84.27 | 26,635 |
| K374E | K371E | 41.93 | 3.18 | 82.22 | 25,895 |
| R23E | R20E | 37.16 | 3.29 | 72.86 | 22,167 |
| S265N | S262N | 45.79 | 1.49 | 89.78 | 60,339 |
| R222Q | R219Q | 42.15 | 0.994 | 82.65 | 83,146 |
| S265N/K374D | S262N/K371D | 43.85 | 1.51 | 85.98 | 56,978 |
| S265N/K374E | S262N/K371E | 57.13 | 1.41 | 112.02 | 79,390 |
| S265N/R23E | S262N/R20E | 53.25 | 1.43 | 104.41 | 72,812 |
| S265N/R23E/K374D | S262N/R20E/K371D | 43.42 | 1.50 | 85.14 | 56,948 |
| S265N/R23E/K374E | S262N/R20E/K371E | 63.74 | 1.29 | 124.98 | 96,585 |
| R222Q/K374E | R219Q/K371E | 58.56 | 0.99 | 114.82 | 115,937 |
| R222Q/K374D | R219Q/K371D | 60.87 | 0.79 | 119.35 | 150,584 |
| R222Q/R23E | R219Q/R20E | 60.47 | 0.84 | 118.57 | 141,778 |
| R222Q/K374E/R23E | R219Q/K371E/R20E | 54.48 | 0.86 | 106.82 | 124,474 |
| R222Q/K374D/R23E | R219Q/K371D/R20E | 60.68 | 0.67 | 118.98 | 177,795 |
| R222Q/S265N/K374E | R219Q/S262N/K371E | 45.53 | 0.80 | 89.27 | 111,985 |
| R222Q/S265N/K374D | R219Q/S262N/K371D | 50.89 | 0.76 | 99.78 | 131,054 |
| R222Q/S265N/R23E | R219Q/S262N/R20E | 40.59 | 1.01 | 79.59 | 79,192 |
| R222Q/S265N/ | R219Q/S262N/ | 54.82 | 0.77 | 107.49 | 140,199 |
| K374E/R23E | K371E/R20E | | | | |
| R222Q/S265N/ | R219Q/S262N/ | 45.78 | 0.81 | 89.76 | 111,150 |
| K374D/R23E | K371D/R20E | | | | |
| R222Q/S265N | R219Q/S262N | 56.75 | 0.80 | 111.27 | 139,775 |

[1169] B. Heparin Binding of Combination Variants

[1170] Heparin binding activity of single mutants and combination variants containing S265N (S262N by mature numbering) was assessed using the ELISA-based heparin binding assay described in Example 7.A above. The results are set forth in Table 34. The results confirmed that the variants K374D), K374E and R23E exhibit attenuated binding to heparin compared to WT-ADA2. In addition, the S265N (S262N by mature numbering) variant, designed for improved enzymatic activity by modification of an active site residue, also possessed attenuated binding to heparin coated plates, indicating that modifications of the enzyme active site can impact heparin binding in an allosteric manner. Further, all of the tested combination variants showed significantly attenuated binding to heparin, illustrating that combinations of variants can be created that exhibit improved enzyme activity towards adenosine and attenuated binding to heparin.

TABLE 34
Heparin Binding ELISA assay of
ADA2 WT and combination variants

| Substitution | Substitution | Heparin Binding | |
|---|---|---|---|
| (Zavialov | (mature | ELISA Average | |
| numbering) | numbering) | OD₄₅₀ | stdev. |
| K374D | K371D | 0.87 | 0.03 |
| K374E | K371E | 0.03 | 0.01 |
| R23E | R20E | 0.71 | 0.04 |
| S265N | S262N | 0.88 | 0.19 |
| S265N/K374D | S262N/K371D | 0.92 | 0.13 |
| S265N/K374E | S262N/K371E | 0.6 | 0.12 |
| S265N/R23E | S262N/R20E | 1.03 | 0.02 |
| S265N/R23E/K374D | S262N/R20E/K371D | 0.69 | 0.07 |
| S265N/R23E/K374E | S262N/R20E/K371E | 0.93 | 0.11 |
| WT ADA2 | WT ADA2 | 2.31 | 0.01 |
| WT ADA1 | WT ADA1 | −0.02 | 0 |

### Example 12

### Thermal Stability of rHuADA2 Wt and Variants

[1171] The stability of the rHuADA2 WT and variants was measured by differential scanning fluorimetry (DSF) at increasing temperatures. DSF measures conformational stability, which correlates with thermal stability. The melting temperature (Tm) in DSF is defined as the midpoint of the protein unfolding transition.

[1172] Non-PEGylated WT rHuADA2, non-PEGylated rHuADA2 variants, and PEGylated forms of WT rHuADA2 and rHuADA2 variants were prepared at concentrations of 0.1-1 mg/mL and mixed with the ROX™ protein thermal shift dye (Applied Biosystems, Carlsbad, Calif.; Cat. No. 4461146) to a final dye concentration that corresponds to a 125-fold dilution of the stock ROX™ solution. Protein samples were then loaded into 96-well plate at a volume of 20 μL/well in triplicate. A ViiA7 RT-PCR System (Applied Biosystems, Carlsbad, Calif.) was used to measure the shift in fluorescence as the temperature of the samples were increased. The reactions were subjected to the following steps: incubation at 25° C. for 2 min; ramping of temperature from 25 to 99° C. at a rate of 0.05° C. per second; followed by a 99° C. incubation for 2 min. The wavelengths used for emission and excitation were 623nanometers (nm) and 580 nm, respectively.

[1173] Table 35 sets forth the melting temperature (Tm) determined from the DSF analysis. The results show that the Tm of variant K374E (K371E by mature numbering) is 1.4° C. higher than WT ADA2, which indicates an improvement in thermal stability of the variant. The other tested variants show comparable or slightly lower Tm than WT ADA2. The results show that all PEGylated forms exhibited a higher Tm than the corresponding non-PEGylated from, which also indicates that PEGylation improves the thermal stability of the enzymes.

TABLE 35
Melting temperature (Tm) of ADA2
WT, variants and PEGylated forms

| Replacement | Replacement | |
|---|---|---|
| (Zavialov | (mature | |
| numbering) | numbering) | Tm (° C.) |
| WT ADA2 | WT ADA2 | 67.1 |
| K374D | K371D | 66.8 |
| K374E | K371E | 69.7 |
| R23E | R20E | 65.2 |
| S265N | S262N | 60.8 |
| S265N/K374D | S262N/K371D | 60.8 |
| S265N/K374E | S262N/K371E | 61.3 |
| S265N/R23E | S262N/R20E | 59.6 |
| S265N/R23E/K374D | S262N/R20E/K371D | 59.8 |
| S265N/R23E/K374E | S262N/R20E/K371E | 60.4 |
| PEG-WT ADA2 | PEG-WT ADA2 | 68.81 |
| PEG-K374D | PEG-K371D | 67.81 |
| PEG-R23E | PEG-R20E | 66.4 |

### Example 13

### pH Optimum of rHuADA2 Wt and Variants

[1174] Adenosine deaminase activity of rHuADA2 and variants at varying pH were assessed to determine the pH optimum of each. The adenosine deaminase activity was determined spectrophotometrically by direct measurement of changes in adenosine absorbance. The UV absorption spectra of adenosine (ADO) and inosine (INO) are very similar and they overlap significantly, with respective absorbance peaks at 261 nm and 249 nm. During the deamination reaction, the absorbance of ADO decreases while that of INO increases with time. Since the dynamic changes in absorbance make it difficult to monitor activity at a single wavelength, the relative ADO activity was determined as a ratio of the ADO peak to isosbestic point (i.e. the wavelength where ADO and INO have the same extinction coefficient). The isosbestic point, which is 253 nm, remains unchanged and is concentration independent, so that it is the reference point to correct for volume or intensity discrepancies. Therefore, changes in adenosine concentration, and hence adenosine deaminase activity, was assessed as the ratio of absorbance at 261 nm/absorbance at 253 nm (A₂₆₁/A₂₅₃), based on a standard curve.

[1175] A. Standard Curve

[1176] To construct the standard curve for ADO and INO, a series of solution mixtures in 0.001% Tween-20 containing different concentrations of ADO and INO were prepared. The total concentration of ADO and INO mix was 50 μM, in 1×PBS (10 mM phosphate, 137 mM NaCl, 2.7 mM KCl), pH 7.4. The samples were scanned with the wavelengths between 220 nm and 300 nm to determine the isosbestic point, where all spectra cross. Table 36 sets forth the measurements for the standard curve. The A₂₆₁/A₂₅₃ ratio was plotted against ADO concentration and linear fitting resulted in a standard curve of A₂₆₁/A₂₅₃=0.0249[ADO]-0.0152 (R²=0.999).

TABLE 36
Standard curve for Spectrophotometric
determination of adenosine concentration

| [ADO] (μM) | A₂₆₁ | A₂₅₃ | A₂₆₁/A₂₅₃ |
|---|---|---|---|
| 50 | 0.669 | 0.5455 | 1.2264 |
| 49.5 | 0.6543 | 0.5366 | 1.2193 |
| 49 | 0.6493 | 0.5388 | 1.2051 |
| 48.5 | 0.6418 | 0.5378 | 1.1934 |
| 48 | 0.6352 | 0.5386 | 1.1794 |
| 47.5 | 0.6306 | 0.5406 | 1.1665 |
| 47 | 0.6244 | 0.5406 | 1.1550 |
| 46.5 | 0.6134 | 0.5363 | 1.1438 |
| 46 | 0.6108 | 0.5402 | 1.1307 |
| 45.5 | 0.6026 | 0.5395 | 1.1170 |
| 45 | 0.5965 | 0.5404 | 1.1038 |

[1177] B. Adenosine Deaminase Activity Spectrophotometric Assay

[1178] For performing the spectrophotometric adenosine deaminase assay of ADA2 and variants, a 2×solution containing 10 mM ADO in 100 mM potassium phosphate buffer (KPB), 0.1% Tween-20 at different pHs (i.e. 5.5, 6, 6.5, 6.75, 7, 7.25, 7.4, 7.75 and 8) were prepared. A separate 2× solution containing 2 μg/mL WT rHuADA2 or variants were prepared in the same 100 mM potassium phosphate buffer (KPB), 0.10% Tween-20 at the respective pH (i.e. 5.5, 6, 6.5, 6.75, 7, 7.25, 7.4, 7.75 and 8). An equal volume of the ADO solution and the ADA2 solution (wildtype or variants) were mixed to initiate reaction. At each time point (i.e. 1, 3, 5, 7, 9, 11, 13 and 15 min), a small aliquot (4 μl) was removed and diluted 50 times by adding to 196 μl 1×PBS, pH 7.4. The diluted samples were further diluted 2 fold (in duplicates) by adding 85 μl samples to 85 μl 1×PBS in a UV-transparent half area plate. The absorbance at 253 nm and 261 nm were measured of each diluted sample.

[1179] Adenosine concentration was determined using the A₂₆₁/A₂₅₃ ratio and the standard curve. Adenosine deaminase activity was measured by negative change in ADO concentration per min×100.

[1180] Table 37 sets forth the results of the adenosine deaminase activity, as measured by the spectrophotometric assay, at various pH. The results showed that the optimal pH (highest deaminase activity) for WT rHuADA2 activity is approximately 6.5. ADA2 variants K374D (K371D by mature numbering) and K374E (K371E by mature numbering) have a similar activity pH profile as WT rHuADA2.

[1181] In contrast, the ADA2 S265N variant (S262N by mature numbering) has a pH optimum at a higher pH of 7.25. Double- and triple-variants containing the S265N mutation (S262N by mature numbering) also results in a similar pH optimum at 7.25.

TABLE 37
Adenosine deaminase activity of ADA2 and variants at varying pH

| Replacement | Replacement | Adenosine deaminase activity Δ [ADO]/min × (−100) at pH | | | | | | | | |
|---|---|---|---|---|---|---|---|---|---|---|
| (Zavialov No.) | (mature No.) | 5.5 | 6 | 6.5 | 6.75 | 7 | 7.25 | 7.4 | 7.75 | 8 |
| WT ADA2 | WT ADA2 | 21.11 | 22.06 | 33.77 | 29.76 | 28.70 | 24.47 | 21.77 | 6.65 | 3.58 |
| K374D | K371D | 12.19 | 10.68 | 14.22 | 12.90 | 13.22 | 12.86 | 10.55 | 1.55 | 3.46 |
| K374E | K371E | 15.76 | 19.15 | 27.09 | 25.72 | 24.63 | 21.88 | 18.32 | 5.98 | 4.25 |
| R23E | R20E | 22.84 | 25.64 | 29.18 | 29.47 | 28.53 | 21.71 | 19.37 | 7.41 | 5.33 |
| S265N | S262N | 24.61 | 31.59 | 41.30 | 44.46 | 45.16 | 50.99 | 45.81 | 25.16 | 3.70 |
| S265N/K374D | S262N/K371D | 22.89 | 33.51 | 39.06 | 41.58 | 45.98 | 42.69 | 43.37 | 22.29 | 4.36 |
| S265N/K374E | S262N/K371E | 31.84 | 44.31 | 50.23 | 54.55 | 59.68 | 60.07 | 57.15 | 28.28 | 1.77 |
| S265N/R23E | S262N/R20E | 27.34 | 38.26 | 45.58 | 48.49 | 51.90 | 56.12 | 50.44 | 24.42 | 4.63 |
| S265N/R23E/K374D | S262N/R20E/K371D | 20.27 | 28.16 | 35.51 | 33.24 | 40.08 | 42.28 | 34.66 | 18.46 | 4.94 |
| S265N/R23E/K374E | S262N/R20E/K371E | 37.94 | 52.70 | 66.08 | 67.95 | 74.68 | 77.81 | 67.77 | 35.97 | 2.04 |

### Example 14

### In Vivo Pharmacokinetic Analysis of Pegylated rHuADA2 Combination Variants

[1182] The pharmacokinetics (PK) of the PEGylated ADA2-K374D, PEGylated ADA2-R222Q/S265N and PEGylated ADA2-R222Q/S265N/K374D variants by Zavialov numbering (K371D, R219Q/S262N and R219Q/S262N/K371D, respectively, by mature numbering) were analyzed in an immunocompetent mouse model.

[1183] A. Study design

[1184] Twenty-seven (27) male BALB/c mice were divided into three (3) dosing groups, and were further divided into three (3) groups each for sampling of blood at different time points. Thus, the mice were randomized into nine (9) groups total. Mice were weighed prior to the start of the study, and randomized into the 9 groups based upon their body weights. In each sampling group, three groups of (3) mice were used for dosing each test article to prevent oversampling of the blood from the animals. For measurement of baseline ADA2 levels, a blood sample was obtained from 12 randomly chosen mice and plasma was prepared using the anti-coagulant potassium (K₃) ethylene diamine tetraacetic acid (K₃-EDTA). All blood was collected by submandibular venipuncture.

[1185] Each mouse was injected by intravenous tail-vein injection with a 3 mg/kg dose of one of three PEGylated ADA2 variant test article as set forth in in Table 38, i.e., PEG-rHuADA2-K374D (K371D by mature numbering), PEG-rHuADA2-R222Q/S265N (R219Q/S262N by mature numbering) or PEG-rHuADA2-R222Q/S265N/K374D (R219Q/S262N/K371D by mature numbering). PEGylated ADA2 variants were prepared using the PEGylation method as described in Example 8.A, with minor modifications. Briefly, all ADA2 variants at 10 mg/mL were PEGylated with linear PEG-20K (JenKem Technology, Plano, Tex.; Cat. No. M-SCM-20K) at 1:15 molar ratio and incubated first at 370 for 30 min, then at 4° C. for 16 hours. SDS-PAGE and analytical SEC results show that 100% of the ADA2 variants were PEGylated under the optimized PEGylation condition and all PEGylated ADA2 variants retained 100% enzymatic activity.

[1186] Approximately 200 μL of whole blood was collected at designated sampling time points from appropriate groups of mice as indicated below in Table 38 and kept on ice until plasma preparation. The initial two (2) blood samples were collected by submandibular venipuncture. The final sample was collected from a terminal bleed. Plasma was prepared by centrifuging the blood (500×g for 5 min at 4° C.), transferring the plasma to a fresh tube and immediately freezing at −80° C. until the adenosine deaminase activity assay. Adenosine deaminase activity was determined as described in Example 4.

[1187] Non-compartmental analysis (NCA) was conducted using the Phoenix WinNonlin version 6.3 (Pharsight Corp, St. Louis, Mo. 63101). The half-life, or time taken for the activity of ADA2 proteins to be reduced by half, was calculated. Also, total exposure was measured by calculating the Area Under the Concentration-time Curve (AUC). The AUC and half-life values were obtained from the unweighted average from each test article group. The following options in the Phoenix WinNonlin program were used for data analysis: (i) linear trapezoidal/linear interpolation option for AUC; (ii) best-fit slope selection option for terminal slope; and (iii) uniform weighting of the data.

TABLE 38
Pharmacokinetics Study Design for
PEGylated ADA2 WT and variants

| | | | | | Blood |
|---|---|---|---|---|---|
| | | | | | Collection |
| | | | | | Time points |
| | Test Article | | No. of | | post dosing |
| Group # | (ZavialoNo.) | (Mature No.) | Animals | Dose | (hours) |
| 1 | PEG-K374D | PEG-K371D | 3 | 3 mg/kg | 0.25, 8, 48 |
| 2 | | | 3 | | 1, 4, 72 |
| 3 | | | 3 | | 2, 24, 168 |
| 4 | PEG-R222Q/ | PEG-R219Q/ | 3 | 3 mg/kg | 0.25, 8, 48 |
| 5 | S265N | S262N | 3 | | 1, 4, 72 |
| 6 | | | 3 | | 2, 24, 168 |
| 7 | PEG- | PEG- | 3 | 3 mg/kg | 0.25, 8, 48 |
| 8 | R222Q/ | R219Q/ | 3 | | 1, 4, 72 |
| 9 | S265N/ | S262N/ | 3 | | 2, 24, 168 |
| | K374D | K371D | | | |

[1188] B. Results

[1189] 1. Pharmacokinetics of Non-PEGylated rHuADA2 WT and Variants

[1190] The pharmacokinetics (PK) properties of PEGylated ADA2 variants PEG-K374D (K371D by mature numbering), PEG-R222Q/S265N(R219Q/S262N by mature numbering) and PEG-R222Q/S265N/K374D (R219Q/S262N/K371D by mature numbering) are set forth in Tables 39 and 40. Table 39 sets forth the total exposure measured using an Area Under the Curve (AUC) calculation and Table 40 sets for the half-life (t_{1/2}) of the tested PEGylated rHuADA2 variants.

[1191] The results show that PEGylation substantially improves the pharmacokinetic profile of ADA2 and all tested PEGylated ADA2 variants exhibited significant higher AUC and longer half-life than the non-PEGylated WT rHuADA2 (see Example 9 and Tables 26 and 27). PEG-R222Q/S265N (R219Q/S262N by mature numbering) exhibited the largest improvement, with an AUC that is 496610% higher than the non-PEGylated WT rHuADA2, and a half-life that was 4043% longer than the non-PEGylated WT rHuADA2. The PEG-K374D (K371D by mature numbering) exhibited a greater improvement of PK properties compared to the same test article group in Example 9 and Tables 26 and 27, which can be attributed to the optimized PEGylation conditions used in preparing the test articles. PGP-6T1

TABLE 39
Comparison of Total Exposure-Area under the Curve
(AUC): PEGylated ADA2 combination variants

| Test Article | Test article | | Percent increase in |
|---|---|---|---|
| (Zavialov | (Mature | AUC | AUC compared |
| numbering) | numbering) | (U*h)/mL | to WT ADA2 |
| PEG-K374D | PEG-K371D | 4,662 | 14,177 |
| PEG-R222Q/ | PEG-R219Q/S262N | 16,330 | 49,661 |
| S265N | | | |
| PEG-K374D/ | PEG-K371D/ | 9,340 | 28,404 |
| R222Q/S265N | R219Q/S262N | | |

TABLE 40
Comparison of half-life (t_{1/2}): PEGylated ADA2 variants

| Test Article | Test article | Half-life | Percent increase |
|---|---|---|---|
| (Zavialov | (Mature | slow (t_{1/2}) | in t_{1/2} compared |
| numbering) | numbering) | (min) | to WT ADA2 |
| PEG-K374D | PEG-K371D | 2,256 | 3,269 |
| PEG-R222Q/ | PEG-R219Q/ | 2,790 | 4,043 |
| S265N | S262N | | |
| PEG-K374D/ | PEG-K371D/ | 2,364 | 3,426 |
| R222Q/S265N | R219Q/S262N | | |

### Example 15

### Generation of Additional Combination Variants

[1192] Additional combinations variants were generated, combining amino acid substitution(s) that increased enzymatic activity and/or amino acid substitution(s) that confer attenuated heparin binding, with other modifications, such as deletions/insertions/substitutions and amino acid replacement(s) that confer other altered activity. In particular, the amino acid substitution S265N and/or R222Q (S262N and/or R219Q, by mature numbering) which conferred the greatest increases in enzymatic activity as described in Example 10, were combined with other ADA2 modifications described in previous Examples. The amino acid replacement K374D (K371D by mature numbering) was also combined with other ADA2 modifications described in previous Examples. The combination variants are set forth in Table 41.

TABLE 41
Other Combination Variants

| Substitution | Substitution | |
|---|---|---|
| (Zavialov | (mature | SEQ |
| numbering) | numbering) | ID NO: |
| K374D/V102-Q147del→(GGGGS)₁ | K371D/V99-Q144del→(GGGGS)₁ | 589 |
| K374D/V102-Q147del→(GGGGS)₂ | K371D/V99-Q144del→(GGGGS)₂ | 590 |
| K374D/V102-Q147del→(GGGGS)₃ | K371D/V99-Q144del→(GGGGS)₃ | 591 |
| K374D/C108-T150del→(GGGGS)₁ | K371D/C105-T147del→(GGGGS)₁ | 592 |
| K374D/C108-T150del→(GGGGS)₂ | K371D/C105-T147del→(GGGGS)₂ | 593 |
| K374D/C108-T150del→(GGGGS)₃ | K371D/C105-T147del→(GGGGS)₃ | 594 |
| R222Q/S265N/——→N4/ | R219Q/S262N/——→N1/ | 596 |
| ——→A5/——→S6 | ——→A2/——→S3 | |
| R222Q/S265N/R23N/V25S | R219Q/S262N/R20N/V22S | 597 |
| R222Q/S265N/K374N/D376S | R219Q/S262N/K371N/D373S | 598 |
| R222Q/S265N/K375N/I377S | R219Q/S262N/K372N/I374S | 599 |
| R222Q/S265N/T406N/H408S | R219Q/S262N/T403N/H405S | 600 |
| R222Q/S265N/G407N/P409S | R219Q/S262N/G404N/P406S | 601 |
| R222Q/S265N/C108-T150del→(Gly)₁₅ | R219Q/S262N/C105-T147del→(Gly)₁₅ | 602 |
| R222Q/S265N/C108-T150del→(Gly)₁₀ | R219Q/S262N/C105-T147del→(Gly)₁₀ | 603 |
| R222Q/S265N/C108-T150del→(Gly)₇ | R219Q/S262N/C105-T147del→(Gly)₇ | 604 |
| R222Q/S265N/C108-T150del→(Gly)₅ | R219Q/S262N/C105-T147del→(Gly)₅ | 605 |
| R222Q/S265N/C108-T150del→(Gly)₃ | R219Q/S262N/C105-T147del→(Gly)₃ | 606 |
| R222Q/S265N/R128N/P129A | R219Q/S262N/R125N/P126A | 607 |
| R222Q/S265N/S130N/K132S | R219Q/S262N/S127N/K129S | 608 |
| R222Q/S265N/P129N/E131T | R219Q/S262N/P126N/E128T | 609 |
| R222Q/S265N/R115N/I117T | R219Q/S262N/R112N/I114T | 610 |
| R222Q/S265N/I137N/L138C/L139T | R219Q/S262N/I134N/L135C/L136T | 611 |
| R222Q/S265N/I137N/L138S/L139T | R219Q/S262N/I134N/L135S/L136T | 612 |
| R222Q/S265N/R145N/Q147S | R219Q/S262N/R142N/Q144S | 613 |
| R222Q/S265N/E140N/Y142T | R219Q/S262N/E137N/Y139T | 614 |
| R222Q/S265N/P114N/G116S | R219Q/S262N/P111N/G113S | 615 |
| R222Q/S265N/F122S | R219Q/S262N/F119S | 616 |
| R222Q/S265N/F122K | R219Q/S262N/F119K | 617 |
| R222Q/S265N/Y227R | R219Q/S262N/Y224R | 618 |
| R222Q/S265N/Y227N | R219Q/S262N/Y224N | 619 |
| R222Q/S265N/Y194S | R219Q/S262N/Y191S | 620 |
| R222Q/S265N/Y194D | R219Q/S262N/Y191D | 621 |
| R222Q/S265N/F186K | R219Q/S262N/F183K | 622 |
| R222Q/S265N/Y194D/Y227R | R219Q/S262N/Y191D/Y224R | 623 |
| R222Q/S265N/F112S | R219Q/S262N/F109S | 624 |
| R222Q/S265N/F112A | R219Q/S262N/F109A | 625 |
| R222Q/S265N/R121D | R219Q/S262N/R118D | 626 |
| R222Q/S265N/R121A | R219Q/S262N/R118A | 627 |
| R222Q/S265N/Y142T | R219Q/S262N/Y139T | 628 |
| R222Q/S265N/Y142A | R219Q/S262N/Y139A | 629 |
| R222Q/S265N/W136S | R219Q/S262N/W133S | 630 |
| R222Q/S265N/W136T | R219Q/S262N/W133T | 631 |
| R222Q/S265N/P127A | R219Q/S262N/P124A | 632 |
| R222Q/S265N/P127S | R219Q/S262N/P124S | 633 |
| R222Q/S265N/V102- | R219Q/S262N/V99- | 634 |
| Q147del→(GGGGS)₁ | Q144del→(GGGGS)₁ | |
| R222Q/S265N/V102- | R219Q/S262N/V99- | 635 |
| Q147del→(GGGGS)₂ | Q144del→(GGGGS)₂ | |
| R222Q/S265N/V102- | R219Q/S262N/V99- | 636 |
| Q147del→(GGGGS)₃ | Q144del→(GGGGS)₃ | |
| R222Q/S265N/C108- | R219Q/S262N/C105- | 637 |
| T150del→(GGGGS)₁ | T147del→(GGGGS)₁ | |
| R222Q/S265N/C108- | R219Q/S262N/C105- | 638 |
| T150del→(GGGGS)₂ | T147del→(GGGGS)₂ | |
| R222Q/S265N/C108- | R219Q/S262N/C105- | 639 |
| T150del→(GGGGS)₃ | T147del→(GGGGS)₃ | |
| R222Q/S265N/K374D/V102- | R219Q/S262N/K371D/V99- | 640 |
| Q147del→(GGGGS)₁ | Q144del→(GGGGS)₁ | |
| R222Q/S265N/K374D/V102- | R219Q/S262N/K371D/V99- | 641 |
| Q147del→(GGGGS)₂ | Q144del→(GGGGS)₂ | |
| R222Q/S265N/K374D/V102- | R219Q/S262N/K371D/V99- | 642 |
| Q147del→(GGGGS)₃ | Q144del→(GGGGS)₃ | |
| R222Q/S265N/K374D/C108- | R219Q/S262N/K371D/C105- | 643 |
| T150del→(GGGGS)₁ | T147del→(GGGGS)₁ | |
| R222Q/S265N/K374D/C108- | R219Q/S262N/K371D/C105- | 644 |
| T150del→(GGGGS)₂ | T147del→(GGGGS)₂ | |
| R222Q/S265N/K374D/C108- | R219Q/S262N/K371D/C105- | 645 |
| T150del→(GGGGS)₃ | T147del→(GGGGS)₃ | |
| K374D/C108-T150del→(Gly)₁₅ | K371D/C105-T147del→(Gly)₁₅ | 647 |
| K374D/C108-T150del→(Gly)₁₀ | K371D/C105-T147del→(Gly)₁₀ | 648 |
| K374D/C108-T150del→(Gly)₇ | K371D/C105-T147del→(Gly)₇ | 649 |
| K374D/C108-T150del→(Gly)₅ | K371D/C105-T147del→(Gly)₅ | 650 |
| K374D/C108-T150del→(Gly)₃ | K371D/C105-T147del→(Gly)₃ | 651 |
| R222Q/S265N/K374D/C108- | R219Q/S262N/K371D/C105- | 671 |
| T150del→(Gly)₁₅ | T147del→(Gly)₁₅ | |
| R222Q/S265N/K374D/C108- | R219Q/S262N/K371D/C105- | 672 |
| T150del→(Gly)₁₀ | T147del→(Gly)₁₀ | |
| R222Q/S265N/K374D/C108- | R219Q/S262N/K371D/C105- | 673 |
| T150del→(Gly)₇ | T147del→(Gly)₇ | |
| R222Q/S265N/K374D/C108- | R219Q/S262N/K371D/C105- | 674 |
| T150del→(Gly)₅ | T147del→(Gly)₅ | |
| R222Q/S265N/K374D/C108- | R219Q/S262N/K371D/C105- | 675 |
| T150del→(Gly)₃ | T147del→(Gly)₃ | |
| R222Q/S265N/K14A | R219Q/S262N/K11A | 659 |
| R222Q/S265N/K14D | R219Q/S262N/K11D | 660 |
| R222Q/S265N/K14E | R219Q/S262N/K11E | 661 |
| R222Q/S265N/K16A | R219Q/S262N/K13A | 662 |
| R222Q/S265N/K16D | R219Q/S262N/K13D | 663 |
| R222Q/S265N/K16E | R219Q/S262N/K13E | 682 |
| R222Q/S265N/K374A | R219Q/S262N/K371A | 683 |
| R222Q/S265N/K375A | R219Q/S262N/K372A | 684 |
| R222Q/S265N/K375D | R219Q/S262N/K372D | 685 |
| R222Q/S265N/K375E | R219Q/S262N/K372E | 686 |
| R222Q/S265N/K455A | R219Q/S262N/K452A | 687 |
| R222Q/S265N/K455D | R219Q/S262N/K452D | 688 |
| R222Q/S265N/K455E | R219Q/S262N/K452E | 689 |
| R222Q/S265N/R23A | R219Q/S262N/R20A | 690 |
| R222Q/S265N/R23D | R219Q/S262N/R20D | 691 |
| R222Q/S265N/R369A | R219Q/S262N/R366A | 692 |
| R222Q/S265N/R369D | R219Q/S262N/R366D | 693 |
| R222Q/S265N/R369E | R219Q/S262N/R366E | 694 |
| R222Q/S265N/H267A | R219Q/S262N/H264A | 695 |
| R222Q/S265N/H267Q | R219Q/S262N/H264Q | 696 |
| R222Q/S265N/H267N | R219Q/S262N/H264N | 697 |
| R222Q/S265N/H267G | R219Q/S262N/H264G | 698 |
| R222K/S265N | R219K/S262N | 699 |
| R222N/S265N | R219N/S262N | 700 |
| R222A/S265N | R219A/S262N | 701 |
| R222Q/S265N/L224A | R219Q/S262N/L221A | 702 |
| R222Q/S265N/L224V | R219Q/S262N/L221V | 703 |
| R222Q/S265N/L224G | R219Q/S262N/L221G | 704 |
| R222Q/S265N/E182D | R219Q/S262N/E179D | 705 |
| R222Q/S265N/E182A | R219Q/S262N/E179A | 706 |
| R222Q/S265N/E182S | R219Q/S262N/E179S | 707 |
| R222Q/S265N/E182T | R219Q/S262N/E179T | 708 |
| R222Q/S265N/E182V | R219Q/S262N/E179V | 709 |
| R222Q/S265N/E182G | R219Q/S262N/E179G | 710 |
| R222Q/S265A | R219Q/S262A | 711 |
| R222Q/S265V | R219Q/S262V | 712 |
| R222Q/S265M | R219Q/S262M | 713 |
| R222Q/S265N/K14A/R23A | R219Q/S262N/K11A/R20A | 714 |
| R222Q/S265N/K14A/R23A/K374A | R219Q/S262N/K11A/R20A/K371A | 715 |
| R222Q/S265N/R23A/K374A | R219Q/S262N/R20A/K371A | 716 |
| R222Q/S265N/K14A/K374A | R219Q/S262N/K11A/K371A | 717 |
| R222Q/S265N/K29A | R219Q/S262N/K26A | 718 |
| R222Q/S265N/K29D | R219Q/S262N/K26D | 719 |
| R222Q/S265N/K29E | R219Q/S262N/K26E | 720 |
| R222Q/S265N/R220A | R219Q/S262N/R217A | 721 |
| R222Q/S265N/R220D | R219Q/S262N/R217D | 722 |
| R222Q/S265N/R220E | R219Q/S262N/R217E | 723 |
| R222Q/S265N/K261A | R219Q/S262N/K258A | 724 |
| R222Q/S265N/K261D | R219Q/S262N/K258D | 725 |
| R222Q/S265N/K261E | R219Q/S262N/K258E | 726 |
| R222Q/S265N/R280A | R219Q/S262N/R277A | 727 |
| R222Q/S265N/R280D | R219Q/S262N/R277D | 728 |
| R222Q/S265N/R280E | R219Q/S262N/R277E | 729 |
| R222Q/S265N/R286A | R219Q/S262N/R283A | 730 |
| R222Q/S265N/R286D | R219Q/S262N/R283D | 731 |
| R222Q/S265N/R286E | R219Q/S262N/R283E | 732 |
| R222Q/S265N/K312A | R219Q/S262N/K309A | 733 |
| R222Q/S265N/K312D | R219Q/S262N/K309D | 734 |
| R222Q/S265N/K312E | R219Q/S262N/K309E | 735 |
| R222Q/S265N/K320A | R219Q/S262N/K317A | 736 |
| R222Q/S265N/K320D | R219Q/S262N/K317D | 737 |
| R222Q/S265N/K320E | R219Q/S262N/K317E | 738 |
| R222Q/S265N/K324A | R219Q/S262N/K321A | 739 |
| R222Q/S265N/K324D | R219Q/S262N/K321D | 740 |
| R222Q/S265N/K324E | R219Q/S262N/K321E | 741 |
| R222Q/S265N/R355A | R219Q/S262N/R352A | 742 |
| R222Q/S265N/R355D | R219Q/S262N/R352D | 743 |
| R222Q/S265N/R355E | R219Q/S262N/R352E | 744 |
| R222Q/S265N/R444A | R219Q/S262N/R441A | 745 |
| R222Q/S265N/R444D | R219Q/S262N/R441D | 746 |
| R222Q/S265N/R444E | R219Q/S262N/R441E | 747 |
| R222Q/S265N/K447A | R219Q/S262N/K444A | 748 |
| R222Q/S265N/K447D | R219Q/S262N/K444D | 749 |
| R222Q/S265N/K447E | R219Q/S262N/K444E | 750 |
| R222Q/S265N/K464A | R219Q/S262N/K461A | 751 |
| R222Q/S265N/K464D | R219Q/S262N/K461D | 752 |
| R222Q/S265N/K464E | R219Q/S262N/K461E | 753 |
| R222Q/S265N/K472A | R219Q/S262N/K469A | 754 |
| R222Q/S265N/K472D | R219Q/S262N/K469D | 755 |
| R222Q/S265N/K472E | R219Q/S262N/K469E | 756 |
| R222Q/S265N/K473A | R219Q/S262N/K470A | 757 |
| R222Q/S265N/K473D | R219Q/S262N/K470D | 758 |
| R222Q/S265N/K473E | R219Q/S262N/K470E | 759 |
| R222Q/S265N/D89A | R219Q/S262N/D86A | 760 |
| R222Q/S265N/D89C | R219Q/S262N/D86C | 761 |
| R222Q/S265N/D89E | R219Q/S262N/D86E | 762 |
| R222Q/S265N/D89F | R219Q/S262N/D86F | 763 |
| R222Q/S265N/D89G | R219Q/S262N/D86G | 764 |
| R222Q/S265N/D89H | R219Q/S262N/D86H | 765 |
| R222Q/S265N/D89I | R219Q/S262N/D86I | 766 |
| R222Q/S265N/D89K | R219Q/S262N/D86K | 767 |
| R222Q/S265N/D89L | R219Q/S262N/D86L | 768 |
| R222Q/S265N/D89M | R219Q/S262N/D86M | 769 |
| R222Q/S265N/D89N | R219Q/S262N/D86N | 770 |
| R222Q/S265N/D89P | R219Q/S262N/D86P | 771 |
| R222Q/S265N/D89Q | R219Q/S262N/D86Q | 772 |
| R222Q/S265N/D89R | R219Q/S262N/D86R | 773 |
| R222Q/S265N/D89S | R219Q/S262N/D86S | 774 |
| R222Q/S265N/D89T | R219Q/S262N/D86T | 775 |
| R222Q/S265N/D89V | R219Q/S262N/D86V | 776 |
| R222Q/S265N/D89W | R219Q/S262N/D86W | 777 |
| R222Q/S265N/D89Y | R219Q/S262N/D86Y | 778 |
| R222Q/S265N/E182C | R219Q/S262N/E179C | 779 |
| R222Q/S265N/E182F | R219Q/S262N/E179F | 780 |
| R222Q/S265N/E182H | R219Q/S262N/E179H | 781 |
| R222Q/S265N/E182I | R219Q/S262N/E179I | 782 |
| R222Q/S265N/E182K | R219Q/S262N/E179K | 783 |
| R222Q/S265N/E182L | R219Q/S262N/E179L | 784 |
| R222Q/S265N/E182M | R219Q/S262N/E179M | 785 |
| R222Q/S265N/E182N | R219Q/S262N/E179N | 786 |
| R222Q/S265N/E182P | R219Q/S262N/E179P | 787 |
| R222Q/S265N/E182Q | R219Q/S262N/E179Q | 788 |
| R222Q/S265N/E182R | R219Q/S262N/E179R | 789 |
| R222Q/S265N/E182W | R219Q/S262N/E179W | 790 |
| R222Q/S265N/E182Y | R219Q/S262N/E179Y | 791 |
| R222C/S265N | R219C/S262N | 792 |
| R222D/S265N | R219D/S262N | 793 |
| R222E/S265N | R219E/S262N | 794 |
| R222F/S265N | R219F/S262N | 795 |
| R222G/S265N | R219G/S262N | 796 |
| R222H/S265N | R219H/S262N | 797 |
| R222I/S265N | R219I/S262N | 798 |
| R222L/S265N | R219L/S262N | 799 |
| R222M/S265N | R219M/S262N | 800 |
| R222P/S265N | R219P/S262N | 801 |
| R222S/S265N | R219S/S262N | 802 |
| R222T/S265N | R219T/S262N | 803 |
| R222V/S265N | R219V/S262N | 804 |
| R222W/S265N | R219W/S262N | 805 |
| R222Y/S265N | R219Y/S262N | 806 |
| R222Q/S265N/L224C | R219Q/S262N/L221C | 807 |
| R222Q/S265N/L224D | R219Q/S262N/L221D | 808 |
| R222Q/S265N/L224E | R219Q/S262N/L221E | 809 |
| R222Q/S265N/L224F | R219Q/S262N/L221F | 810 |
| R222Q/S265N/L224H | R219Q/S262N/L221H | 811 |
| R222Q/S265N/L224I | R219Q/S262N/L221I | 812 |
| R222Q/S265N/L224K | R219Q/S262N/L221K | 813 |
| R222Q/S265N/L224M | R219Q/S262N/L221M | 814 |
| R222Q/S265N/L224N | R219Q/S262N/L221N | 815 |
| R222Q/S265N/L224P | R219Q/S262N/L221P | 816 |
| R222Q/S265N/L224Q | R219Q/S262N/L221Q | 817 |
| R222Q/S265N/L224R | R219Q/S262N/L221R | 818 |
| R222Q/S265N/L224S | R219Q/S262N/L221S | 819 |
| R222Q/S265N/L224T | R219Q/S262N/L221T | 820 |
| R222Q/S265N/L224W | R219Q/S262N/L221W | 821 |
| R222Q/S265N/L224Y | R219Q/S262N/L221Y | 822 |
| R222Q/S265C | R219Q/S262C | 823 |
| R222Q/S265D | R219Q/S262D | 824 |
| R222Q/S265E | R219Q/S262E | 825 |
| R222Q/S265F | R219Q/S262F | 826 |
| R222Q/S265G | R219Q/S262G | 827 |
| R222Q/S265H | R219Q/S262H | 828 |
| R222Q/S265I | R219Q/S262I | 829 |
| R222Q/S265K | R219Q/S262K | 830 |
| R222Q/S265L | R219Q/S262L | 831 |
| R222Q/S265P | R219Q/S262P | 832 |
| R222Q/S265Q | R219Q/S262Q | 833 |
| R222Q/S265R | R219Q/S262R | 834 |
| R222Q/S265T | R219Q/S262T | 835 |
| R222Q/S265W | R219Q/S262W | 836 |
| R222Q/S265Y | R219Q/S262Y | 837 |
| R222Q/S265N/H267C | R219Q/S262N/H264C | 838 |
| R222Q/S265N/H267D | R219Q/S262N/H264D | 839 |
| R222Q/S265N/H267E | R219Q/S262N/H264E | 840 |
| R222Q/S265N/H267F | R219Q/S262N/H264F | 841 |
| R222Q/S265N/H267I | R219Q/S262N/H264I | 842 |
| R222Q/S265N/H267K | R219Q/S262N/H264K | 843 |
| R222Q/S265N/H267L | R219Q/S262N/H264L | 844 |
| R222Q/S265N/H267M | R219Q/S262N/H264M | 845 |
| R222Q/S265N/H267P | R219Q/S262N/H264P | 846 |
| R222Q/S265N/H267R | R219Q/S262N/H264R | 847 |
| R222Q/S265N/H267S | R219Q/S262N/H264S | 848 |
| R222Q/S265N/H267T | R219Q/S262N/H264T | 849 |
| R222Q/S265N/H267V | R219Q/S262N/H264V | 850 |
| R222Q/S265N/H267W | R219Q/S262N/H264W | 851 |
| R222Q/S265N/H267Y | R219Q/S262N/H264Y | 852 |
| R222Q/S265N/S269A | R219Q/S262N/S266A | 853 |
| R222Q/S265N/S269C | R219Q/S262N/S266C | 854 |
| R222Q/S265N/S269D | R219Q/S262N/S266D | 855 |
| R222Q/S265N/S269E | R219Q/S262N/S266E | 856 |
| R222Q/S265N/S269F | R219Q/S262N/S266F | 857 |
| R222Q/S265N/S269G | R219Q/S262N/S266G | 858 |
| R222Q/S265N/S269H | R219Q/S262N/S266H | 859 |
| R222Q/S265N/S269I | R219Q/S262N/S266I | 860 |
| R222Q/S265N/S269K | R219Q/S262N/S266K | 861 |
| R222Q/S265N/S269L | R219Q/S262N/S266L | 862 |
| R222Q/S265N/S269M | R219Q/S262N/S266M | 863 |
| R222Q/S265N/S269N | R219Q/S262N/S266N | 864 |
| R222Q/S265N/S269P | R219Q/S262N/S266P | 865 |
| R222Q/S265N/S269Q | R219Q/S262N/S266Q | 866 |
| R222Q/S265N/S269R | R219Q/S262N/S266R | 867 |
| R222Q/S265N/S269T | R219Q/S262N/S266T | 868 |
| R222Q/S265N/S269V | R219Q/S262N/S266V | 869 |
| R222Q/S265N/S269W | R219Q/S262N/S266W | 870 |
| R222Q/S265N/S269Y | R219Q/S262N/S266Y | 871 |
| R222Q/S265N/K270A | R219Q/S262N/K267A | 872 |
| R222Q/S265N/K270C | R219Q/S262N/K267C | 873 |
| R222Q/S265N/K270D | R219Q/S262N/K267D | 874 |
| R222Q/S265N/K270E | R219Q/S262N/K267E | 875 |
| R222Q/S265N/K270F | R219Q/S262N/K267F | 876 |
| R222Q/S265N/K270G | R219Q/S262N/K267G | 877 |
| R222Q/S265N/K270H | R219Q/S262N/K267H | 878 |
| R222Q/S265N/K270I | R219Q/S262N/K267I | 879 |
| R222Q/S265N/K270L | R219Q/S262N/K267L | 880 |
| R222Q/S265N/K270M | R219Q/S262N/K267M | 881 |
| R222Q/S265N/K270N | R219Q/S262N/K267N | 882 |
| R222Q/S265N/K270P | R219Q/S262N/K267P | 883 |
| R222Q/S265N/K270Q | R219Q/S262N/K267Q | 884 |
| R222Q/S265N/K270R | R219Q/S262N/K267R | 885 |
| R222Q/S265N/K270S | R219Q/S262N/K267S | 886 |
| R222Q/S265N/K270T | R219Q/S262N/K267T | 887 |
| R222Q/S265N/K270V | R219Q/S262N/K267V | 888 |
| R222Q/S265N/K270W | R219Q/S262N/K267W | 889 |
| R222Q/S265N/K270Y | R219Q/S262N/K267Y | 890 |
| R222Q/S265N/V299A | R219Q/S262N/V296A | 891 |
| R222Q/S265N/V299C | R219Q/S262N/V296C | 892 |
| R222Q/S265N/V299D | R219Q/S262N/V296D | 893 |
| R222Q/S265N/V299E | R219Q/S262N/V296E | 894 |
| R222Q/S265N/V299F | R219Q/S262N/V296F | 895 |
| R222Q/S265N/V299G | R219Q/S262N/V296G | 896 |
| R222Q/S265N/V299H | R219Q/S262N/V296H | 897 |
| R222Q/S265N/V299I | R219Q/S262N/V296I | 898 |
| R222Q/S265N/V299K | R219Q/S262N/V296K | 899 |
| R222Q/S265N/V299L | R219Q/S262N/V296L | 900 |
| R222Q/S265N/V299M | R219Q/S262N/V296M | 901 |
| R222Q/S265N/V299N | R219Q/S262N/V296N | 902 |
| R222Q/S265N/V299P | R219Q/S262N/V296P | 903 |
| R222Q/S265N/V299Q | R219Q/S262N/V296Q | 904 |
| R222Q/S265N/V299R | R219Q/S262N/V296R | 905 |
| R222Q/S265N/V299S | R219Q/S262N/V296S | 906 |
| R222Q/S265N/V299T | R219Q/S262N/V296T | 907 |
| R222Q/S265N/V299W | R219Q/S262N/V296W | 908 |
| R222Q/S265N/V299Y | R219Q/S262N/V296Y | 909 |
| R222Q/K14A/R23A | R219Q/K11A/R20A | 910 |
| R222Q/K14A/R23A/K374A | R219Q/K11A/R20A/K371A | 911 |
| R222Q/R23A/K374A | R219Q/R20A/K371A | 912 |
| R222Q/K14A/K374A | R219Q/K11A/K371A | 913 |
| S265N/K14A/R23A | S262N/K11A/R20A | 914 |
| S265N/K14A/R23A/K374A | S262N/K11A/R20A/K371A | 915 |
| S265N/R23A/K374A | S262N/R20A/K371A | 916 |
| S265N/K14A/K374A | S262N/K11A/K371A | 917 |

### Example 16

### Kinetic Assessment of Adenosine Deaminase Activity of rHuADA2 PRB Domain Deletion Combination Variants

[1193] Combination variants containing the K374D mutation (K371D by mature numbering) and PRB deletions replaced with (GGGGS)ₙ linker, set forth in SEQ ID NOS:588-593, were assessed for kinetic parameters of adenosine deaminase activity, using the assay method described in Example 11.A above. The first set of variants contain a deletion of residues V102-Q147 (V99-Q144, by mature numbering), replaced with (GGGGS)ₙ linker of various length (e.g., n=1, 2 or 3; set forth in SEQ ID NOS: 588-590), and the second set of variants contain a deletion of residues C108-T150 (C105-T147, by mature numbering), replaced with (GGGGS)˜linker of various length (e.g., n=1, 2 or 3; set forth in SEQ ID NOS: 591-593. Kinetic parameters were tested at pH 7.6, and the results are set forth in Table 42.

[1194] The results indicate that all tested ADA2 PRB domain deletion mutants remain enzymatic activity, and generally exhibit approximately 5 to 7-fold lower Kₘ and 8 to 11-fold higher catalytic efficiency (k_{cat}/Kₘ) at pH 7.6, compared to the WTADA2.

TABLE 42
Kinetic parameters of ADA2 WT and variants at pH 7.6; [E] = 8.5 nM

| Replacement | Replacement | | | | |
|---|---|---|---|---|---|
| (Zavialov | (mature | Vmax | Kₘ | k_{cat} | k_{cat}/Kₘ |
| numbering) | numbering) | (μM/min) | (mM) | (1/s) | (1/Ms) |
| K374D/V102- | K371D/V99- | 43.46 | 0.89 | 85.22 | 95,748 |
| Q147del→(GGGGS)₁ | Q144del→(GGGGS)₁ | | | | |
| K374D/V102- | K371D/V99- | 44.52 | 0.87 | 87.29 | 100,338 |
| Q147del→(GGGGS)₂ | Q144del→(GGGGS)₂ | | | | |
| K374D/V102- | K371D/V99- | 43.01 | 0.82 | 84.33 | 102,846 |
| Q147del→(GGGGS)₃ | Q144del→(GGGGS)₃ | | | | |
| K374D/C108- | K371D/C105- | 43.1 | 0.91 | 84.51 | 92,532 |
| T150del→(GGGGS)₁ | T147del→(GGGGS)₁ | | | | |
| K374D/C108- | K371D/C105- | 36.92 | 0.85 | 72.39 | 85,167 |
| T150del→(GGGGS)₂ | T147del→(GGGGS)₂ | | | | |
| K374D/C108- | K371D/C105- | 38.12 | 0.77 | 74.75 | 97,223 |
| T150del→(GGGGS)₃ | T147del→(GGGGS)₃ | | | | |

### Example 17

### Tumor Growth Inhibition (TGI) Assessment of Pegylated rHuADA2-K374D Using the CT26 Syngeneic Tumor Model

[1195] The murine CT26 syngeneic tumor model was used to assess the antitumor activity of ADA2.

[1196] A. Syngeneic Tumor Model and Treatment

[1197] Forty-four (44) male BALB/c mice were inoculated subcutaneously with 5×10⁶ murine colon cancer tumor cells (CT26, ATCC CRL-2638) in 0.1 mL injection volume per animal. Tumor volume was determined using digital calipers by caliper measurement of the length (L) and width (W) of the solid tumor masses. Tumor volume (TV) was calculated as: (L×W²)/2. Tumors were allowed to grow and tumor bearing mice were staged until when the tumors were palpable and measured to be about 50-100 mm³.

[1198] PEGylated rHuADA2-K374D (K371D by mature numbering) was prepared as described in Example 8.A, with minor modifications to generate a preparation in which approximately 100% of the molecules were PEGylated as assessed by SDS-PAGE. Briefly, a preparation of rHuADA2-K374D (K371D by mature numbering) at 10 mg/mL was mixed with linear PEG-20K (JenKem Technology, Plano, Tex.; Cat. No. M-SCM-20K) at 1:15 molar ratio and incubated first at 4° C. for 16 hours, and then at 30° C. for 60 min.

[1199] For treatment, animals were randomized into four groups (n=8/group). CT26 tumor bearing mice were then injected intravenously (IV) every other day, at 3 mg/kg body weight, 10 mg/kg body weight or 30 mg/kg body weight doses of PEG-K374D (PEG-K371D by mature numbering) or vehicle control (buffer only) every other day. Tumor volume was measured at day 0 and 8 using caliper measurement as described above. Percent Tumor Growth Inhibition (TGI) for each respective tumor model was calculated using the following equation:

% TGI=[1−(Tₙ−T₀)÷(Cₙ−C₀)]×100%

where “Tₙ” is the average tumor volume for the treatment group at day “n” after the final dose of PEG-K374D or control; “T₀” is the average tumor volume in that treatment group at day 0, before treatment; “C₀” is the average tumor volume for the corresponding control group at day “n”; and “C₀” is the average tumor volume in the control group at day 0, before treatment. One mouse from the vehicle group was excluded due to significant tumor growth inhibition.

[1200] B. Results

[1201] Table 43 sets forth the results of the average tumor volume and tumor growth inhibition at day 8 in the mice administered with PEG-K374D compared to the vehicle injected control. At day 8, the average tumor volume for the vehicle control group was 446.67 mm³ (n=7). For the group injected with 3 mg/kg of PEG-K374D, the average tumor volume was 257.72 mm³, indicating a tumor growth inhibition (TGI) of 50% (n=8; p-value=0.037). For the group injected with 10 mg/kg of PEG-K374D, the average tumor volume was 207.84 mm³, indicating a TGI of 63% (n=8; p-value=0.0056). For the group injected with 30 mg/kg of PEG-K374D, the average tumor volume was 187.32 mm³, indicating a TGI of 68% (n=8; p-value=0.0085). The results show that administration of PEG-K374D results in significant tumor growth inhibition.

TABLE 43
Tumor volume and tumor growth inhibition
(TGI) in mice administered with PEG-K374D

| | | | Average | | p value |
|---|---|---|---|---|---|
| | | No. of | Tumor | Tumor | (t-Test) |
| | | Mice per | Volume | Growth | compared |
| Dose | | group | (mm³) | Inhibition | to vehicle |
| Vehicle | | 7 | 446.67 | 0% | |
| 3 | mg/kg | 8 | 257.72 | 50% | 0.037 |
| 10 | mg/kg | 8 | 207.84 | 63% | 0.0056 |
| 30 | mg/kg | 8 | 187.32 | 68% | 0.0085 |

### Example 18

### Tumor Growth Inhibition (TGI) Assessment of Combination Therapy with Pegylated rHuADA2, Anti-PD-1 and Anti-CTLA4

[1202] The murine CT26 syngeneic tumor model was used to compare the antitumor activity of combination therapy using PEGylated ADA2 with checkpoint inhibitors anti-PD-1 and anti-CTLA4 antibodies. CT26 syngeneic tumors were produced by injecting 2×10⁵ CT26 cells in 0.05 mL injection volume per animal into the right peritibial muscle of male Balb/C mice. Tumor bearing mice were staged into treatment groups when the average tumor size reached 150 mm³.

[1203] For treatment, animals were randomized into 8 groups (n=8/group) as follows: 1) saline vehicle control, 2) PEG-ADA2-K374D, 3) α-CTLA4 antibody (Clone 9D9, Cat. No. BE0164; BioXCell, West Lebanon, N.H., 4) α-PD-1 antibody (Clone RMP1-14, Cat. No. BE0146; BioXCell, West Lebanon, N.H.), 5) PEG-ADA2-K374D+α-CTLA4; 6) PEG-K374D+α-PD-1; 7) α-CTLA4+α-PD-1, or 8) Triple combo (PEG-ADA2-K374D+α-CTLA4+α-PD-1). PEG-ADA2-K374D was dosed intravenously 3×weekly at 10 mg/kg, α-CTLA4 was dosed intraperitoneally biweekly at 4 mg/kg, and α-PD-1 was dosed intraperitoneally biweekly at 4 mg/kg. The sequence of dosing in the combination groups was as follows: PEG-ADA2-K374D followed by α-CTLA4 followed by α-PD-1.

[1204] Tumor volume was assessed twice weekly via ultrasound imaging using the Vevo2100 (Visual Sonics, Toronto, Canada) to determine tumor growth inhibition (TGI). Animals were anesthetized using light isoflurane anesthesia while the tumor volumes were measured. For tumor measurement, the region of interest was covered in ultrasound gel (Parker Laboratories, Fairfield, N.J.), and the RMV-716 (focal depth=17.5 mm) scan head was positioned directly over the region of interest. While in 2D-Mode, the approximate center of the tumor was located, and subsequently an image (˜150-200 frames) was captured using 3D-mode. Approximately 15-30 frames out of 150-200 frames were analyzed and a tumor volume calculated and expressed in mm³. Tumor growth Inhibition (TGI) was calculated as described above.

[1205] The results are presented in Table 44. Table 44 depicts the average tumor volume per group, on study day 10 (SD10), 48 hours after PEG-ADA2-K374D and 72 hours after α-CTLA4 and α-PD-1, and the range of tumor volume of all animals in the group. The TGI compared to vehicle control also is depicted. The results show that PEG-ADA2-K374D, α-CTLA4 and α-PD-1 each individually exhibited tumor growth inhibition activity, with α-CTLA4 exhibiting greater tumor growth reduction than the other single treatments. The results show a slight synergistic effect of the combination therapy of PEG-ADA2-K374D with either α-CTLA4 or α-PD-1. A further increase in tumor growth inhibition was observed in the triple combination therapy. In contrast, the combination therapy of α-CTLA4 and α-PD-1 only slightly increased tumor growth inhibition as compared to treatment with α-CTLA4.

TABLE 44
Tumor Growth Inhibition of Combination Therapy

| | Average Group | | |
|---|---|---|---|
| | Tumor Volume, | | |
| Treatment | SD10 | Volume Range | TGI |
| Vehicle | 1567.53 | 1389-1890 | — |
| PEG-ADA2-K374D | 1499.11 | 1213-1594 | 5% |
| α-CTLA4 | 1050.78 | 860-1232 | 37% |
| α-PD-1 | 1359.2 | 1131-1616 | 15% |
| PEG-ADA2-K374D + | 965.21 | 731-1207 | 43% |
| α-CTLA4 | | | |
| PEG-ADA2-K374D + | 1244.43 | 687-1539 | 23% |
| α-PD-1 | | | |
| α-CTLA4 + α-PD-1 | 993.97 | 763-1252 | 41% |
| Triple Combo | 835.77 | 687-989 | 52% |

### Example 19

### PEG-ADA2 Distribution in CT26 Peritibial Tumors or Normal Organs

[1206] To assess the distribution and elimination of administered PEG-ADA2-K374D in the tumor microenvironment or in normal organs, immunofluorescence was used to assess the presence of PEG-ADA2-K374D administered to mice. PEG-ADA2-K374D was labeled at room temperature for 60 minutes with DyLight755 Sulfhydryl-Reactive Dye (DL755), a near-IR fluor, using the DyLight 755 Antibody Labeling Kit (Thermo Scientific, Rockford, Ill.). Alexa Fluor 750 (AF 750) labeled bovine serum albumin (BSA, 1 mg/mL) was purchased from (Life Technology, Carlsbad, Calif.).

[1207] A. Distribution in CT26 Peritibial Tumors

[1208] CT26 syngeneic tumors were produced by injecting 2×10⁵ cells in 0.05 mL injection volume per animal into the right peritibial muscle of male Balb/C mice. When average tumor size reached 600 mm³, tumor-bearing mice were staged into 2 groups (n=4/group) to receive either PEG-ADA2-K374D^{DL755} at 0.5 mg/kg or BSA^{AF750} at 0.5 mg/kg intravenously. The distribution of DL755 labeled PEG-ADA2-K374D (PEG-ADA2-K374D^{DL755}) and AF 750 labeled BSA (BSA^{AF750}) in mouse tumors was assessed using the IVIS Caliper fluorescent imaging system with an excitation wavelength of 745 nm and an emission wavelength of 800 nm (Caliper Life Sciences, Alameda, Calif.) and signal intensity was measured with LivingImage software. Images were captured before administration of labeled proteins and at 10 minute, 2, 6 hours and daily after administration of labeled proteins.

[1209] The results are set forth in Table 45. The images showed a strong fluorescent intensity at the tumor site in all treatment groups. Fluorescent intensity of images demonstrated PEG-ADA2-K374D^{DL755} rapidly accessed to CT26 tumor and reached the plateau at 48 hours. Only 30% of PEG-ADA2-K374D^{DL755} was eliminated from tumors on day 6 post PEG-ADA2-K374D^{DL755} injection. In contrast, less control agent BSA^{AF750} accessed to the tumors, and the fluorescent intensity was reduced quickly. Nearly 100% of BSA^{AF750} was eliminated from the tumors on day 6. Thus, the results demonstrate that PEG-ADA2-K374D^{DL755} has a high affinity to CT26 tumors.

TABLE 45
Tumor Distribution

| | BSA^{AF750} | | PEG-ADA2-K374D^{DL755} | |
|---|---|---|---|---|
| Hour | (Fluorescent intensity) | | (Fluorescent intensity) | |
| −1 | 7.86E+08 | ±6.92E7 | 7.80E+08 | ±5.67E7 |
| 0.2 | 2.95E+09 | ±9.69E7 | 4.52E+09 | ±5.72E8 |
| 2 | 3.92E+09 | ±2.93E8 | 4.64E+09 | ±6.06E8 |
| 6 | 4.64E+09 | ±7.81E8 | 6.54E+09 | ±6.44E8 |
| 24 | 3.18E+09 | ±4.88E8 | 9.48E+09 | ±1.30E9 |
| 48 | 1.94E+09 | ±7.70E7 | 1.12E+10 | ±8.26E8 |
| 72 | 1.30E+09 | ±1.40E8 | 8.95E+09 | ±7.40E8 |
| 96 | 9.86E+08 | ±2.98E7 | 1.07E+10 | ±8.26E8 |
| 144 | 7.78E+08 | ±3.45E7 | 4.83E+09 | ±5.80E8 |
| 168 | 6.39E+08 | ±7.03E7 | 3.64E+09 | ±3.10E8 |
| 196 | 6.59E+08 | ±3.42E7 | 2.68E+09 | ±4.09E8 |

[1210] B. Comparison of Distribution in CT26-Tumor Bearing Mice or Balb/C Nave Mice

[1211] To compare the distribution in naïve mice, CT26-tumor bearing mice were generated as described above, and were intravenously administered PEG-ADA2-K374D^{DL755} at 0.5 mg/kg (n=3). Separately, naïve Balb/c mice also were intravenously administered PEG-ADA2-K374D^{DL755} at 0.5 mg/kg (n=4). The mice were sacrificed and transcardically perfused with heparin normal saline 24 hours post PEG-ADA2K374D^{DL755}Tumors from tumor-bearing mice and organs from naïve mice were collected and imaged with IVIS image system, and DL755 signal intensity was measured with LivingImage software as described above. Signal intensity was normalized by tissue organ weight.

[1212] The results are set forth in Table 46. Signal intensity or each organ was compared to the signal intensity of the tumor, and set forth as a ratio (tumor/organ). The results showed that compared to the other organs, the highest signal intensity was observed in the tumor. The liver and spleen did show high fluorescent intensity, which was 1.5-fold and 2.1-fold less, respectively, than in the tumor. Other organs, such as the brain and heart, showed low signal intensity with 29-fold and 11-fold, respectively, less signal intensity than the tumor. Thus, the results show that PEG-ADA2-K374D^{DL755} has a lower affinity to normal organs.

TABLE 46
Distribution in Normal Organs vs. Tumors

| | PEG-ADA2-K374D, 24 hr | | |
|---|---|---|---|
| | (Fluorescent intensity/Tissue | | Signal Intensity |
| Organ | Weight) − Baseline | | (Tumor vs Organ) |
| Lung | 1.22E+06 | ±1.11E6 | 5.1 |
| Heart | 5.55E+05 | ±1.88E5 | 11.2 |
| Liver | 4.02E+06 | ±5.17E5 | 1.5 |
| Spleen | 2.98E+06 | ±7.44E5 | 2.1 |
| Kidney | 8.61E+05 | ±8.23E5 | 7.2 |
| Colon | 9.13E+05 | ±3.01E5 | 6.8 |
| Brain | 2.11E+05 | ±1.86E5 | 29.5 |
| Bone | 1.82E+06 | ±7.04E5 | 3.4 |
| Tumor | 6.22E+06 | ±2.29E6 | — |

### Example 20

### Tumor Growth Inhibition (TGI) and Survival Assessment of Pegylated rHuADA2-R222Q/S265N Using the MH194+PSC4 Syngeneic Tumor Model

[1213] The murine MH194+PSC4 syngeneic tumor model was used to assess the antitumor efficacy of PEGylated a recombinant adenosine deaminase 2 (ADA2), PEGylated rHuADA2-R222Q/S265N (PEG-R222Q/S265N; PEG-R219Q/S262N by mature numbering). The MH194 mouse pancreatic carcinoma cells are derived from the KrasLSL.G12D/+p53R172H/+PdxCretg/+ genetically engineered mouse model The PSC4 cells are isolated and immortalized pancreatic stellate cells.

A. Syngeneic tumor model

[1214] The murine MH194+PSC4 syngeneic tumor model was used to assess the antitumor efficacy of PEGylated a recombinant adenosine deaminase 2 (ADA2), PEGylated rHuADA2-R222Q/S265N (PEG-R222Q/S265N; PEG-R219Q/S262N by mature numbering).

[1215] The PSC4 cells are isolated and immortalized pancreatic stellate cells. To generate the PSC4 cells, pancreas from C57BL/6 mice were minced with razor blades and placed in 2 mL of a digestion buffer containing 0.05% collagenase P, 0.1% DNAse, and 0.02% Pronase in Gey's balanced salt solution (GBSS). Following two 15 min digestion incubations at 37° C. with thorough mixing after each incubation, the resulting cell suspension was filtered through a 100 μm nylon mesh, washed twice in GBSS with 0.3% bovine serum albumin (BSA), and resuspended in 10 mL GBSS/BSA. Eight mL of Histodenz (Sigma, Cat. No. D2158) was added to the cell suspension, and the entire volume was pipetted under 6 mL GBSS/BSA in order to generate a discontinuous density gradient. Following centrifugation for 20 min at 1,400 g with the brake set at zero, the desired cells were harvested from the interface between the two density volumes and washed once with PBS and once with DMEM medium supplemented with 2 mM L-glutamine, 10% fetal bovine serum, and 1% amphotericin-B (complete DMEM). Cells were immortalized using Lenti-SV40 (Capital Biosciences, Cat. No. CIP-0011) using manufacturer's protocol. The resulting cell line, designated PSC4, were maintained in tissue culture as an adherent monolayer in complete DMEM at 37° C. and 5% CO₂. The MH194 mouse pancreatic carcinoma cells are derived from the KrasLSL.G12D/+p53R172H/+PdxCretg/+ genetically engineered mouse model.

[1216] To generate the MH194+PSC4 syngeneic tumor model, mice (male C57BL/6 mice obtained at 4-6 weeks from Taconic Farms and housed 4/cage) were injected with 50 μL of cell suspension containing parental MIH194 cells along with 5×10⁵ PSC4 (5×10⁶ cells total) intramuscularly, adjacent to the right tibial periosteum.

[1217] Thirty-nine (39) male C57BL/6 mice were co-inoculated subcutaneously with 5×10⁶ of a mixture of murine MH194 pancreatic cancer tumor cells and murine PSC4 pancreatic stellate cells in 0.1 mL injection volume per animal. Tumor volume was determined using digital calipers via measurement of length (L) and width (W) of the solid tumor masses. Tumor volume (TV) was calculated as: (L×W²)/2. Tumors were allowed to grow and tumor bearing mice were staged for test article administration when the tumors were palpable and measured to be approximately 50-100 mm³.

[1218] PEG-R222Q/S265N was prepared using similar methods as described in Example 8.A, with minor modifications to generate a preparation in which approximately 100% of the molecules were PEGylated as assessed by SDS-PAGE. Briefly, a preparation of rHuADA2-R222Q/S265N (R219Q/S262N by mature numbering) at 10 mg/mL was mixed with linear PEG-20K (JenKem Technology, Plano, Tex.; Cat. No. M-SCM-20K) at 1:15 molar ratio and incubated first at 4° C. for 16 hours, and then at 30° C. for 60 min.

[1219] For treatment, MH194+PSC4 tumor bearing mice were randomized into five treatment groups (n=:8): vehicle control (buffer only) or PEG-R222Q/S265N at four treatment doses. MH194+PSC4 tumor bearing mice were then injected intravenously (IV) every other day, at 0.003 mg/kg body weight, 0.03 mg/kg body weight, 0.3 mg/kg body weight and 3 mg/kg body weight of PEG-R222Q/S265N, or vehicle. Tumor volume was measured at day 0 and 8 using caliper measurement as described above. Percent Tumor Growth Inhibition (TGI) for each respective tumor model was calculated using the following equation:

% TGI=[1−(Tₙ−T₀)÷(Cₙ−C₀)]×100%

where “Tₙ” is the average tumor volume for the treatment group at day “n” after the final dose of PEG-R222Q/S265N or control; “T₀” is the average tumor volume in that treatment group at day 0, before treatment; “Cₙ” is the average tumor volume for the corresponding control group at day “n”; and “C₀” is the average tumor volume in the control group at day 0, before treatment. Median survival time (MST) (in days) was calculated as the time at which 50% of the mice of the individual groups reached one of the following endpoints: (1) tumor volume reaches 2000 mm³, (2) the animal loses >25% of its body weight, or (3) the animal appears moribund.

### B. Results

[1220] Table 47 sets forth the results of the average tumor volume and tumor growth inhibition at day 11 in the mice administered with PEG-R222Q/S265N compared to vehicle control. At day 11, the average tumor volume for the vehicle control group was approximately 840 mm³. For the group treated with PEG-R222Q/S265N (0.003 mg/kg), the average tumor volume was approximately 324 mm³, a tumor growth inhibition (TGI) of approximately 72% (n=8; p=0.036), relative to the control group, demonstrating that PEG-R222Q/S265N administration results in significant tumor growth inhibition.

[1221] Table 48 sets forth the results of the median survival time of the mice administered PEG-R222Q/S265N, relative to the vehicle control group. All mice in the control group died between day 13 and day 36, resulting in a median survival time (MST) of 27 days. Five out of eight PEG-R222Q/S265N injected mice (at the 0.003 mg/kg dose) survived beyond 41 days, with an MST of 46 days for PEG-R222Q/S265N treated mice, at the 0.003 mg/kg dose. The results indicate that PEG-R222Q/S265N administration significantly prolongs survival in mice bearing MH194+PSC4 tumors.

TABLE 47
Tumor volume and tumor growth inhibition (TGI)
in mice administered with PEG-R222Q/S265N

| | | Average | | p value |
|---|---|---|---|---|
| | No. of | Tumor | Tumor | (t-Test) |
| Dose | Mice per | Volume | Growth | compared |
| (mg/kg) | group | (mm³) | Inhibition | to vehicle |
| Vehicle | 7 | 840.1 | 0% | |
| 0.003 | 8 | 323.9 | 72% | 0.0357 |
| 0.03 | 8 | 680.45 | 21% | 0.56 |
| 0.3 | 8 | 700.59 | 20% | 0.6 |
| 3 | 8 | 678.58 | 22% | 0.53 |

TABLE 48
Median Survival Time (MST) in mice
administered with PEG-R222Q/S265N

| | No. of | Survival | | | **p value (Log- |
|---|---|---|---|---|---|
| Dose | Mice per | time | MST | Increase | rank) compared |
| (mg/kg) | group | (days) | (days) | in MST | to vehicle |
| Vehicle | 7 | 13-36 | 27 | — | |
| 0.003 | 8 | 22-48+ | 46 | 70% | 0.041 |
| 0.03 | 8 | 13-48+ | 26 | 0% | 0.72 |
| 0.3 | 8 | 13-41 | 32.5 | 20% | 0.49 |
| 3 | 8 | 13-48+ | 23.5 | 0% | 0.83 |

**Log-rank (Mantel-Cox) test

### Example 21

### Tumor Growth Inhibition (TGI) Assessment of Combination Therapy with Pegylated rHuADA2 and Anti-PD-1

[1222] The murine lung cancer KLN205 syngeneic tumor model was used to compare the antitumor activity of PEGylated ADA2-K374D (PEG-K374D); PEG-K371D by mature numbering) combined with checkpoint inhibitor anti-PD-1 antibody.

[1223] KLN205 syngeneic tumor models were produced by injecting thirty-two (32) DBA/2 mice with 5×10⁵ KLN205 murine lung cancer tumor cells (ATCC CRL-1453), in 0.1 mL injection volume per animal, subcutaneously. Tumor bearing mice were staged into treatment groups when the average tumor size reached approximately 100 mm³.

[1224] For treatment, animals were randomized into 4 groups (n=8/group): 1) saline vehicle control, 2) PEG-K374D, 3) α-PD-1 antibody (Clone RMP1-14, Cat. No. BE0146; BioXCell, West Lebanon, N.H.), or 4) PEG-K374D+α-PD-1. PEG-K374D was dosed intravenously biweekly at 0.3 mg/kg, and α-PD-1 was dosed intraperitoneally biweekly at 2 mg/kg). The sequence of dosing in the combination group was PEG-K374D immediately followed by α-PD-1.

[1225] Tumor volume was measured twice weekly using caliper measurement as described above in Example 17.A. Percent Tumor Growth Inhibition (TGI) for each respective tumor model was calculated using the following equation:

% TGI=[1−(Tₙ−T₀)+(Cₙ−C₀)]×100%

[1226] where “Tₙ” is the average tumor volume for the treatment group at day “n” after the final dose of PEG-K374D and α-PD-1 or control; “T₀” is the average tumor volume in that treatment group at day 0, before treatment; “Cₙ” is the average tumor volume for the corresponding control group at day “n”; and “C₀” is the average tumor volume in the control group at day 0, before treatment.

[1227] The results are presented in Table 49. Table 49 depicts the average tumor volume per group, on study day 14 (SD14). The results show that PEG-K374D alone, α-PD-1 alone and the combination of PEG-K374D+α-PD-1 all inhibited tumor growth, compared to the control group. PEG-K374D alone exhibited greater tumor growth inhibition than either α-PD-1 treatment alone or the PEG-K374D+α-PD-1 combination therapy.

TABLE 49
Tumor Growth Inhibition of Combination
Therapy in KLN205 Tumor Model

| | | Average | | p value |
|---|---|---|---|---|
| | No. of | Tumor | Tumor | (t-Test) |
| | Mice per | Volume | Growth | compared |
| Dose | group | (mm³) | Inhibition | to vehicle |
| Vehicle | 8 | 899.41 | 0% | |
| PEG-K374D, 0.3 mg/kg | 8 | 264.56 | 78% | 0.013 |
| α-PD-1, 2 mg/kg | 8 | 545.73 | 43% | 0.16 |
| PEG-K374D + α-PD-1 | 8 | 417.79 | 59% | 0.053 |

### Example 22

### Removal of Free PEGylation Moieties

[1228] Unconjugated, free PEGylation moieties were removed from reactions to PEGylate ADA2 variants using the Capto Phenyl resin columns. Free PEG was removed from the preparations of PEGylated ADA2-K374D (PEG-K374D; PEG-K371D by mature numbering) and PEGylated rHuADA2-R222Q/S265N (PEG-R222Q/S265N; PEG-R219Q/S262N by mature numbering), prepared using the PEGylation method as described in Examples 8.A and 20.A.

[1229] To remove free PEG from the PEG-K374D (polypeptide of SEQ ID NO:20) preparation, 3.5M ammonium sulfate was added to the PEG-K374D in PBS to achieve a final concentration of 0.70 M ammonium sulfate in PBS. The PEG-K374D with ammonium sulfate was then applied to a Capto Phenyl resin column (GE Healthcare) pre-equilibrated with 0.70M ammonium sulfate in PBS, at a ratio of 5 mg PEGylated protein per ml of resin. The loaded Capto Phenyl resin was washed with 10 column volumes of 0.70M ammonium sulfate in PBS. The PEG-K374D was eluted with a decreasing gradient from 0.70M ammonium sulfate in PBS to 0 M ammonium sulfate in PBS. The fractions eluted after 40% gradient elution (0.42M ammonium sulfate in PBS) were pooled. The pooled elution fraction was concentrated to a concentration of 1 to 2 mg/mL, and analyzed by SDS-PAGE. Free PEG was detected using a Corona-Charged Aerosol Detector (Thermo Scientific, Sunnyvale, Calif.).

[1230] To remove free PEG from PEG-R222Q/S265N (polypeptide of SEQ ID NO:273), 3.5M ammonium sulfate was added to the PEG-R222Q/S265N in PBS to achieve a final concentration of 0.64 M ammonium sulfate in PBS. The PEG-R222Q/S265N with ammonium sulfate was then applied to a Capto Phenyl resin column (GE Healthcare) pre-equilibrated with 0.64M ammonium sulfate in PBS, at a ratio of 5 mg PEGylated protein per ml of resin. The loaded Capto Phenyl resin was washed with 10 column volumes of 0.64M ammonium sulfate in PBS. The PEG-R222Q/S265N was eluted with a decreasing gradient from 0.64M ammonium sulfate in PBS to 0 M ammonium sulfate in PBS. The fractions eluted after 60% gradient elution (0.256M ammonium sulfate in PBS) were pooled. An additional elution with 20 column volumes of 15 mM sodium phosphate, pH 7.0 was also pooled with the first pooled elution fraction. The pooled elution fractions were concentrated to a concentration of 1 to 2 mg/mL, and analyzed by SDS-PAGE. Free PEG was detected using a Corona-Charged Aerosol Detector (Thermo Scientific, Sunnyvale, Calif.).

[1231] The results of free PEG removal are presented in Table 50. The results show that the amount of free PEG decreased from approximately 3.7 mg free PEG/mg protein, to 0.13 mg free PEG/mg protein for the PEG-K374D preparation, and from 3.8 mg free PEG/mg protein to 0.2 mg/free PEG/mg protein for the PEG-R222Q/S265N preparation.

TABLE 50
Removal of free PEG from PEGylated ADA2 variant preparations

| | PEG-K374D | PEG-R222Q/S265N |
|---|---|---|
| Starting protein amount | 6 mg | 50 mg |
| Free PEG before Capto | 3.7 mg free PEG/ | 3.8 mg free PEG/ |
| Phenyl resin column | mg protein | mg protein |
| Free PEG after Capto | 0.13 mg free PEG/ | 0.2 mg free PEG/ |
| Phenyl resin column | mg protein | mg protein |
| Amount of protein | 4.5 mg | 28.5 mg |
| recovered after free | | |
| PEG removal | | |
| Protein recovery yield after | 75% | 57% |
| free PEG removal | | |

### Example 23

### Multivesicular Liposome (MVL) PH20 Formulations

[1232] For systemic administration, hyaluronidases, including soluble hyaluronidases, can be prepared in lipids vesicles, such as liposomes. Exemplary of these are multivesicular liposomes (MVL). Various extended release multivesicular liposome PH20 (MVL-PH20) formulations were prepared using the following general procedure, see also, International PCT Pub. No. WO 2012/109387 and US Patent Pub. No. 2013/0251786. The lipid solutions contained mixtures of various neutral lipids, including triglycerides (TG) triolein (C_{18:1}), tricaprylin (C_{8:0}) and cholesterol, and lipids with both positive and negative charges, including phosphatidylcholines (PC), dioleoylphosphatidylcholine (DOPC, C_{18:1}), dierucoyl phosphatidylcholine (DEPC, C_{22:1}) and dipalmitoyl phosphorylglycerol (DPPG, C_{16:1}). Total PC concentration was up to 19.8 mM, cholesterol concentration was 30 mM, TG concentration was up to 3.9 mM and DPPG concentration was 4.2 mM.

[1233] A. Generation of MVL-PH20 Formulations

[1234] MVL formulations containing varying mole percent of DEPC and DOPC (0-100%) and varying mole percent of triolein and tricaprylin (0-100%), DPPG, cholesterol, and 0.1, 0.25, 0.5, 1 or 2 mg/mL PH20 were prepared. In the first step, the lipids in chloroform (oil phase) and PH20 in a first aqueous solution (water phase) were combined and emulsified to form a water-in-oil emulsion, whereby the PH20 was encapsulated by the phospholipid monolayer. In the second step, a second aqueous solution was added and emulsified, whereby a water-in-oil-in-water emulsion was formed. After addition of a second aliquot of the second aqueous solution, the chloroform solvent was evaporated and the resulting product containing multivesicular liposomes was washed multiple times in a third aqueous solution and resuspended to approximately 50% lipocrit (packed particle volume) and stored at 2-8° C.

[1235] Exemplary formulations were prepared using either a mini vortex or were prepared on a larger scale using an Omni mixer (Omni Macro ES, Omni International, Kennesaw, Ga.). In the latter Omni mixer method, the lipid solution in chloroform (6 mL) was emulsified at 7,000 rpm for 8 min with an Omni Mixer with 6 mL of the first aqueous solution (10 mM His-HCl, pH 6.5 with 5% sucrose containing varying concentrations of PH20) producing a water-in-oil emulsion. A subsequent emulsification at 4500 rpm for 1-3 min with 20 mL of a second aqueous solution of 3.2% glucose containing 40 mM lysine, pH 10.0, resulted in a water-in-oil-in-water second emulsion. The second emulsion was transferred equally into two Erlenmeyer flasks and another 50 mL aliquot of the second aqueous solution was added to both flasks. Chloroform was removed by flushing nitrogen over the surface of the emulsion at 35° C. The MVL particles containing PH20 were washed three times with 50 mL third aqueous solution (25 mM His-HCl buffer, pH 6.0 containing 120 mM NaCl) by adding the solution, mixing the centrifuge tube by inversion, and centrifugation at 3500 rpm for 10 m at 4° C. in a refrigerated table top centrifuge. Finally, the MVL particles were resuspended in the third aqueous solution to form an approximately 506 lipocrit formulation and stored refrigerated at 2-8° C. The mini vortex procedure was similar, using the parameters set forth in Table 30.

[1236] Table 51 below summarizes the first, second and third aqueous solutions. Table 51 also summarizes the volumes, reagent concentrations and other parameters of each step of the MVL process.

TABLE 51
MVL-PH20 formulation and process parameters

| 1st Aqueous Solution | 10 mM His-HCl, pH 6.5 with 5% sucrose | | | | |
|---|---|---|---|---|---|
| 2nd Aqueous Solution | 3.2% glucose containing 40 mM lysine, pH 10.0 | | | | |
| 3rd Aqueous Solution | 25 mM His-HCl buffer, pH 6.0 containing 120 mM NaCl | | | | |
| 1^{st} Emulsion Mixing | Vortex Mixer | | Omni Mixer | | |
| PH20 in 1st aqueous | 600 μL | | 6 mL | | |
| solution | | | | | |
| Lipid Solution in | 600 μL | | 6 mL | | |
| chloroform | | | | | |
| Total Volume | 1.2 mL | | 12 mL | | |
| 1^{st} Emulsification Speed | Maximum RPM | | 7000 RPM | | |
| Time | 8 min | | 8 min | | |
| Starting PH20 protein | 0.25 mg/mL | 0.5 mg/mL | 0.5 mg/mL | 1.0 mg/mL | 2.0 mg/mL |
| concentration (activity) | (30,000 | (60,000 | (60,000 | (120,000 | (240,000 |
| | U/mL) | U/mL) | U/mL) | U/mL) | U/mL) |

| PC | 15.8-19.8 mM | 15.8-19.8 mM |
|---|---|---|
| Cholesterol | 30 mM | 30 mM |
| TG | 3.75-3.9 mM | 3.75-3.9 mM |
| DPPG | 4.2 mM | 4.2 mM |
| Blade Type 1 | Not applicable | Sharp on the sides |
| Blade Type 2 | Not applicable | Sharp on the sides and on the |
| | | inside |
| Blade Type 3 | Not applicable | Flat all over, not sharp |
| 2^{nd} Emulsion Mixing | Vortex Mixer | Omni Mixer |
| 2nd Aqueous Solution | 2.5 mL | 20 mL |
| Total Volume | 3.7 mL | 32 mL |
| Speed | Maximum RPM | 4500 RPM |
| Time | 15 sec | 1-3 min |
| Solvent Evaporation | Vortex Mixer | Omni Mixer |
| 2nd Aqueous Solution | 10 mL | 100 mL |
| Total Volume | 13.7 mL | 132 mL |
| Shaking Water Bath Speed | 100-130 RPM | 100-130 RPM |
| Time | 11 min | 15 min |
| Temperature | 35° C. | 35° C. |
| Washing, buffer exchange | Vortex Mixer | Omni Mixer |
| and resuspension | | |
| Sample | Entire Sample | 17 mL |
| 3rd Aqueous Solution | 50 mL | 50 mL |
| Total Volume | 50 mL | 200 mL |
| Centrifugation Speed | 3500 RPM | 3500 RPM |
| Time | 10 min | 10 min |
| Number of Washes | 3 | 3 |
| Resuspension Volume | 0.3-0.5 mL | 3-5 mL |
| LIPOCRIT | Vortex Mixer | Omni Mixer |
| Pellet volume | Varies | Varies |
| 3rd Aqueous Solution | Varies | Varies |
| Speed | 3500 rpm | 3500 rpm |
| Time (min) | 10 min | 10 min |
| Solution + Pellet Volume | Varies | Varies |
| % Lipocrit Adjusted to | ~50% | ~50% |

[1237] B. Summary of Exemplary MVL-PH20 Formulations

[1238] Several MVL-PH20 formulations containing varying molar ratios of lipids, PH20 and other additives were prepared using the same general procedures as described above. The various additional additives were included in the first aqueous solution to enhance and preserve the stability of encapsulated PH20. For example, formulations F68 and F69 contained calcium chloride. Formulation F82 contained 150 μL glycerol as an interphase separating the 600 μL chloroform phase and 600 μL first aqueous solution phase. Formulation F83 contained 0.1% dextran 40,000 and 0.1% PEG-6000. Formulations F85-F87 contained hyaluronic acid (HA) oligomers. Several formulations varied in their mixing/emulsification procedures. For example, for formulation F66, the first emulsification step was carried out for 4 minutes, instead of 8 minutes, resulting in smaller liposomal pellets. Formulation F67 was mixed with a rotor wheel, instead of a mini vortex to generate lesser shear during mixing.

[1239] Table 52 below sets forth various MVL-PH20 formulations, including the formulation number, the formulation PC (phosphatidylcholine) and TG (triglyceride) molar % ratios, the starting concentration of PH20 in mg/mL, the mixer used for making the emulsions, and any additives that were included in the first aqueous solution.

TABLE 52
MVL Formulations with PH20

| | | Starting | | |
|---|---|---|---|---|
| | Formulation | PH20 | | |
| | PC & TG | concentration | | Additives in First |
| Formulation | mol % ratio | mg/mL | Mixer | Aqueous Solution |
| F40 | DEPC with Triolein | 0.25 | Mini | N/A |
| | | | Vortex | |
| F41 | DEPC with Triolein | 0 | Mini | N/A |
| | | | Vortex | |
| F42 | DEPC with Triolein | 0.25 | Mini | AlexaFluor 488 |
| | | fluorescent | Vortex | labeled PH20 |
| | | labeled | | |
| F53 | 25/75 DEPC/DOPC; | 0.25 | Mini | N/A |
| | 25/75 Triolein/Tricap | | Vortex | |
| F54 | 50/50 DEPC/DOPC; | 0.25 | Mini | N/A |
| | 50/50 Triolein/Tricap | | Vortex | |
| F55 | 75/25 DEPC/DOPC; | 0.25 | Mini | N/A |
| | 75/25 Triolein/Tricap | | Vortex | |
| F56 | 90/10 DEPC/DOPC; | 0.25 | Mini | N/A |
| | 90/10 Triolein/Tricap | | Vortex | |
| F61 | 50/50 DEPC/DOPC; | 0.25 | Omni | N/A |
| | 50/50 Triolein/Tricap | | | |
| F66 | 50/50 DEPC/DOPC; | 0.25 | Mini | N/A |
| | 50/50 Triolein/Tricap | | Vortex¹ | |
| F67 | 50/50 DEPC/DOPC; | 0.25 | Rotor | N/A |
| | 50/50 Triolein/Tricap | | Wheel | |
| F68 | 50/50 DEPC/DOPC; | 0.25 | Mini | 20 mM CaCl₂ |
| | 50/50 Triolein/Tricap | | Vortex | |
| F69 | 50/50 DEPC/DOPC; | 0.25 | Mini | 10 mM CaCl₂ |
| | 50/50 Triolein/Tricap | | Vortex | |
| F70 | 50/50 DEPC/DOPC; | 0.0 | Omni | N/A |
| | 50/50 Triolein/Tricap | | | |
| F71 | 50/50 DEPC/DOPC; | 0.25 | Omni | N/A |
| | 50/50 Triolein/Tricap | | | |
| F72 | 50/50 DEPC/DOPC; | 0.5 | Omni | N/A |
| | 50/50 Triolein/Tricap | | | |
| F73 | 50/50 DEPC/DOPC; | 0.5 | Omni | N/A |
| | 50/50 Triolein/Tricap | | | |
| F74 | 50/50 DEPC/DOPC; | 1.0 | Omni | N/A |
| | 50/50 Triolein/Tricap | | | |
| F75 | 50/50 DEPC/DOPC; | 2.0 | Omni | N/A |
| | 50/50 Triolein/Tricap | | | |
| F77² | 50/50 DEPC/DOPC; | 1.0 | Omni | |
| | 50/50 Triolein/Tricap | | | |
| F78 | DEPC with Triolein | 1.0 | Omni | N/A |
| F79 | DEPC with Triolein | 1.0 | Omni | N/A |
| F80 | 50/50 DEPC/DOPC; | 1.0 | Omni | N/A |
| | 50/50 Triolein/Tricap | | | |
| F81 | DEPC with Triolein | 0.5 | Omni | N/A |
| F82 | 50/50 DEPC/DOPC; | 0.5 | Mini | 150 μL Glycerol |
| | 50/50 Triolein/Tricap | | Vortex | as interphase |
| F83 | 50/50 DEPC/DOPC; | 1.0 | Omni | 0.1% Dextran |
| | 50/50 Triolein/Tricap | | | 40,000 |
| | | | | 0.1% PEG-6000 |
| F84 | 50/50 DEPC/DOPC; | 1.0 | Omni³ | N/A |
| | 50/50 Triolein/Tricap | | | |
| F85 | 50/50 DEPC/DOPC; | 1.0 | Omni | 15 mg/mL HA 74,000 |
| | 50/50 Triolein/Tricap | | | |
| F85R1 | 50/50 DEPC/DOPC; | 1.0 | Omni | 15 mg/mL HA 74,000 |
| | 50/50 Triolein/Tricap | | | |
| F86 | 50/50 DEPC/DOPC; | 1.0 | Omni | 50 mg/mL HA 74,000 |
| | 50/50 Triolein/Tricap | | | |
| F87 | 50/50 DEPC/DOPC; | 1.0 | Omni | 100 mM Proline |
| | 50/50 Triolein/Tricap | | | |
| F88 | 50/50 DEPC/DOPC; | 1.0 | Omni | 100 mM Arg-HCl, pH |
| | 50/50 Triolein/Tricap | | | 6.44 |
| F89 | 50/50 DEPC/DOPC; | 1.0 | Omni | 6% Sorbitol |
| | 50/50 Triolein/Tricap | | | |
| F90 | 50/50 DEPC/DOPC; | 1.0 | Omni | 6% Trehalose |
| | 50/50 Triolein/Tricap | | | |

¹Shorter first emulsion mixing time (4 min)
²Animal derived cholesterol used instead of plant derived cholesterol in the lipid solution
³Shorter first emulsion mixing time (4 min) and shorter second emulsion mixing time (30 sec)

### Example 24

### PEGADA2 Variant R222Q/S265N Significantly Reduces Adenosine in MH194+PSC4 Tumor Extracellular Matrix

[1240] To assess the effects of PEGADA2 on adenosine in tumor extracellular matrix, mice bearing peritibial MH194+PSC4 tumors received vehicle, the polypeptide whose sequence is set forth in SEQ ID NO:20, which contains the amino acid replacement K374D (Zavialov numbering; K371D mature numbering), at 0.03 mg/kg, or the polypeptide whose sequence is set forth in SEQ ID NO: 273, which contains the amino acid replacements R222Q/S265N (Zavialov numbering; R219Q/S262 mature numbering), at 0.03 mg/kg, 24 or 48 hours prior to microdialysis. Each of the polypeptides were PEGylated as described above in Examples 8 and 22). The mice were anesthetized using isofluorane, and a heating pad was used to maintain body temperature. A small incision was made on the tumor. A microdialysis probe with 55,000 Da molecular weight cut-off (CMA, Stockholm, Sweden) was inserted into the tumor, via a guided cannula. The length of the microdialysis probe used in this study was 10 mm. Once the probe was in position, the cannula was withdrawn leaving the probe completely embedded in the tumor tissue. Dulbecco's phosphate buffered saline (DPBS; Thermo Fisher Scientific) with ADA inhibitors (Pentostatin and 5-iodotubercindin) was perfused through the probe at a flow rate of 1 l/min for 30 minutes. Then the samples were collected at a flow rate of 0.5 l/min for 60 minutes. Microdialysis perfusates were analyzed by Liquid chromatography-mass spectrometry (LC/MS) at MicroConstants (9050 Camino Santa Fe, San Diego, Calif. 92121).

[1241] LC/MS analysis reveals average concentration of adenosine in MH194+PSC4 peritibial tumors was 17.8 μM (n=8). 24 hours post K374D treatment, adenosine concentration was 19.5 μM (n=8), which is above control due to outlier value from one tumor (49 μM). The trend toward reduced adenosine (11 μM) was observed in K374D-treated mice at 48 hours. In contrast, the adenosine is significantly reduced to 6.9 μM (n=8) at 24 hours and 9.8 μM (n=8) at 48 hours post R222Q/S265N treatment (P≤0.05).

TABLE 53
R222Q/S265N reduces adenosine in tumor ECM

| | Adenosine (μM) | |
|---|---|---|
| Group (n = 8) | Mean ± SD | P |
| Vehicle control | 17.8 ± 6.1 | — |
| NME8 @ 24 hours | 19.5 ± 15.3 | >0.05 |
| NME8 @ 48 hours | 11.1 ± 10.9 | >0.05 |
| NME62 @ 24 hours | 6.9 ± 9.0 | ≤0.05 |
| NME62 @ 48 hours | 9.8 ± 8.3 | ≤0.05 |

TABLE 54
Adenosine concentration (μM) in ECM

| | | | | R222Q/ | R222Q/ |
|---|---|---|---|---|---|
| | Vehicle | K374D @ | K374D @ | S265N @ | S265N @ |
| | control | 24 hours | 48 hours | 24 hours | 48 hours |
| | 14.33 | 7.48 | 1.64 | 21.48 | 4.15 |
| | 11.08 | 2.04 | 27.54 | 0.48 | 14.26 |
| | 10.48 | 29.30 | 5.95 | 5.80 | 3.43 |
| | 24.43 | 49.02 | 23.13 | 0.08 | 13.06 |
| | 16.17 | 12.72 | 0.07 | 20.54 | 1.96 |
| | 17.25 | 29.64 | 6.47 | 1.08 | 20.36 |
| | 21.85 | 13.58 | 2.77 | 0.62 | 20.62 |
| | 27.02 | 12.54 | 20.92 | 4.94 | 0.35 |
| Mean | 17.83 | 19.54 | 11.06 | 6.88 | 9.77 |
| SD | 6.09 | 15.35 | 10.95 | 8.98 | 8.30 |
| P (t-test) | | 0.77 | 0.15 | 0.01 | 0.04 |

### Example 25

### Tabular Summary of Exemplary ADA2 Variants and Region of the Protein Modified

[1242] Table 55 provides a summary of the variant ADA2 polypeptides exemplified herein.

[1243] The table provides the position of modification based on Zavialov and mature sequence numbering, and an exemplary SEQ ID NOS: of an ADA2 variant protein that contains such modification. It is understood that modifications can be combined and that additional variants are contemplated. The noted amino acid residues generally can be replaced with conservative amino acid substitutions (see, e.g., Table 3), except in instances, such as hyperglycosylation where a conservative substitution will not create a glycosylation site. Hence, for example, N can be replaced with Q or H. ADA2 variant polypeptides comprising each of the noted modifications are provided. Included among these are the polypeptides whose sequence is referenced with a sequence identifier. Combinations of any of the modifications also are provided. Also provided are modified ADA2 variant dimers, including homodimers and heterodimers. Also provided are multimers of the variants. Also provide are conjugates containing the variants and multimers and dimers, as are methods of treatment, uses for treatment, combinations and pharmaceutical compositions as described herein. The last column identifies the region or domain of the modification, or the activity the modification confers. In general, the mutations, for example, increase activity, decrease heparin binding, introduce glycosylation to interfere with undesirable interactions and/or to increase serum half-life, interfere with or decrease interactions of the PRB domain with the ADA catalytically active portions and/or decrease activities other than the deaminase activity, such as growth factor activity of ADA2 by interfering with binding to receptors that mediate such activities.

TABLE 55
Variant ADA2 polypeptides comprising the listed mutations

| | | SEQ ID | |
|---|---|---|---|
| Zavialov | Mature | NO. of an | |
| numbering | numbering | exemplary | |
| (SEQ ID NO: 4) | (SEQ ID NO: 5) | polypeptides | Type |
| K14A | K11A | 13 | Heparin Binding |
| K14D | K11D | 14 | Heparin Binding |
| K14E | K11E | 15 | Heparin Binding |
| K16A | K13A | 16 | Heparin Binding |
| K16D | K13D | 17 | Heparin Binding |
| K16E | K13E | 18 | Heparin Binding |
| K374A | K371A | 19 | Heparin Binding |
| K374D | K371D | 20 | Heparin Binding |
| K374E | K371E | 21 | Heparin Binding |
| K375A | K372A | 22 | Heparin Binding |
| K375D | K372D | 23 | Heparin Binding |
| K375E | K372E | 24 | Heparin Binding |
| K455A | K452A | 25 | Heparin Binding |
| K455D | K452D | 26 | Heparin Binding |
| K455E | K452E | 27 | Heparin Binding |
| R23A | R20A | 28 | Heparin Binding |
| R23D | R20D | 29 | Heparin Binding |
| R23E | R20E | 30 | Heparin Binding |
| R369A | R366A | 31 | Heparin Binding |
| R369D | R366D | 32 | Heparin Binding |
| R369E | R366E | 33 | Heparin Binding |
| H267A | H264A | 34 | Active Site |
| H267Q | H264Q | 35 | Active Site |
| H267N | H264N | 36 | Active Site |
| H267G | H264G | 37 | Active Site |
| R222K | R219K | 38 | Active Site |
| R222Q | R219Q | 39 | Active Site |
| R222N | R219N | 40 | Active Site |
| R222A | R219A | 41 | Active Site |
| L224A | L221A | 42 | Active Site |
| L224V | L221V | 43 | Active Site |
| L224G | L221G | 44 | Active Site |
| E182D | E179D | 45 | Active Site |
| E182A | E179A | 46 | Active Site |
| E182S | E179S | 47 | Active Site |
| E182T | E179T | 48 | Active Site |
| E182V | E179V | 49 | Active Site |
| E182G | E179G | 50 | Active Site |
| S265A | S262A | 51 | Active Site |
| S265V | S262V | 52 | Active Site |
| S265M | S262M | 53 | Active Site |
| S265N | S262N | 54 | Active Site |
| K14A/R23A | K11A/R20A | 55 | Combination |
| K14A/R23A/K374A | K11A/R20A/K371A | 56 | Combination |
| R23A/K374A | R20A/K371A | 57 | Combination |
| K14A/K374A | K11A/K371A | 58 | Combination |
| S265N/K374D | S262N/K371D | 59 | Combination |
| S265N/K374E | S262N/K371E | 60 | Combination |
| S265N/R23E | S262N/R20E | 61 | Combination |
| S265N/R23E/K374D | S262N/R20E/K371D | 62 | Combination |
| S265N/R23E/K374E | S262N/R20E/K371E | 63 | Combination |
| K29A | K26A | 71 | Heparin Binding |
| K29D | K26D | 72 | Heparin Binding |
| K29E | K26E | 73 | Heparin Binding |
| R220A | R217A | 74 | Heparin Binding |
| R220D | R217D | 75 | Heparin Binding |
| R220E | R217E | 76 | Heparin Binding |
| K261A | K258A | 77 | Heparin Binding |
| K261D | K258D | 78 | Heparin Binding |
| K261E | K258E | 79 | Heparin Binding |
| R280A | R277A | 80 | Heparin Binding |
| R280D | R277D | 81 | Heparin Binding |
| R280E | R277E | 82 | Heparin Binding |
| R286A | R283A | 83 | Heparin Binding |
| R286D | R283D | 84 | Heparin Binding |
| R286E | R283E | 85 | Heparin Binding |
| K312A | K309A | 86 | Heparin Binding |
| K312D | K309D | 87 | Heparin Binding |
| K312E | K309E | 88 | Heparin Binding |
| K320A | K317A | 89 | Heparin Binding |
| K320D | K317D | 90 | Heparin Binding |
| K320E | K317E | 91 | Heparin Binding |
| K324A | K321A | 92 | Heparin Binding |
| K324D | K321D | 93 | Heparin Binding |
| K324E | K321E | 94 | Heparin Binding |
| R355A | R352A | 95 | Heparin Binding |
| R355D | R352D | 96 | Heparin Binding |
| R355E | R352E | 97 | Heparin Binding |
| R444A | R441A | 98 | Heparin Binding |
| R444D | R441D | 99 | Heparin Binding |
| R444E | R441E | 100 | Heparin Binding |
| K447A | K444A | 101 | Heparin Binding |
| K447D | K444D | 102 | Heparin Binding |
| K447E | K444E | 103 | Heparin Binding |
| K464A | K461A | 104 | Heparin Binding |
| K464D | K461D | 105 | Heparin Binding |
| K464E | K461E | 106 | Heparin Binding |
| K472A | K469A | 107 | Heparin Binding |
| K472D | K469D | 108 | Heparin Binding |
| K472E | K469E | 109 | Heparin Binding |
| K473A | K470A | 110 | Heparin Binding |
| K473D | K470D | 111 | Heparin Binding |
| K473E | K470E | 112 | Heparin Binding |
| D89A | D86A | 113 | Active Site |
| D89C | D86C | 114 | Active Site |
| D89E | D86E | 115 | Active Site |
| D89F | D86F | 116 | Active Site |
| D89G | D86G | 117 | Active Site |
| D89H | D86H | 118 | Active Site |
| D89I | D86I | 119 | Active Site |
| D89K | D86K | 120 | Active Site |
| D89L | D86L | 121 | Active Site |
| D89M | D86M | 122 | Active Site |
| D89N | D86N | 123 | Active Site |
| D89P | D86P | 124 | Active Site |
| D89Q | D86Q | 125 | Active Site |
| D89R | D86R | 126 | Active Site |
| D89S | D86S | 127 | Active Site |
| D89T | D86T | 128 | Active Site |
| D89V | D86V | 129 | Active Site |
| D89W | D86W | 130 | Active Site |
| D89Y | D86Y | 131 | Active Site |
| E182C | E179C | 132 | Active Site |
| E182F | E179F | 133 | Active Site |
| E182H | E179H | 134 | Active Site |
| E182I | E179I | 135 | Active Site |
| E182K | E179K | 136 | Active Site |
| E182L | E179L | 137 | Active Site |
| E182M | E179M | 138 | Active Site |
| E182N | E179N | 139 | Active Site |
| E182P | E179P | 140 | Active Site |
| E182Q | E179Q | 141 | Active Site |
| E182R | E179R | 142 | Active Site |
| E182W | E179W | 143 | Active Site |
| E182Y | E179Y | 144 | Active Site |
| R222C | R219C | 145 | Active Site |
| R222D | R219D | 146 | Active Site |
| R222E | R219E | 147 | Active Site |
| R222F | R219F | 148 | Active Site |
| R222G | R219G | 149 | Active Site |
| R222H | R219H | 150 | Active Site |
| R222I | R219I | 151 | Active Site |
| R222L | R219L | 152 | Active Site |
| R222M | R219M | 153 | Active Site |
| R222P | R219P | 154 | Active Site |
| R222S | R219S | 155 | Active Site |
| R222T | R219T | 156 | Active Site |
| R222V | R219V | 157 | Active Site |
| R222W | R219W | 158 | Active Site |
| R222Y | R219Y | 159 | Active Site |
| L224C | L221C | 160 | Active Site |
| L224D | L221D | 161 | Active Site |
| L224E | L221E | 162 | Active Site |
| L224F | L221F | 163 | Active Site |
| L224H | L221H | 164 | Active Site |
| L224I | L221I | 165 | Active Site |
| L224K | L221K | 166 | Active Site |
| L224M | L221M | 167 | Active Site |
| L224N | L221N | 168 | Active Site |
| L224P | L221P | 169 | Active Site |
| L224Q | L221Q | 170 | Active Site |
| L224R | L221R | 171 | Active Site |
| L224S | L221S | 172 | Active Site |
| L224T | L221T | 173 | Active Site |
| L224W | L221W | 174 | Active Site |
| L224Y | L221Y | 175 | Active Site |
| S265C | S262C | 176 | Active Site |
| S265D | S262D | 177 | Active Site |
| S265E | S262E | 178 | Active Site |
| S265F | S262F | 179 | Active Site |
| S265G | S262G | 180 | Active Site |
| S265H | S262H | 181 | Active Site |
| S265I | S262I | 182 | Active Site |
| S265K | S262K | 183 | Active Site |
| S265L | S262L | 184 | Active Site |
| S265P | S262P | 185 | Active Site |
| S265Q | S262Q | 186 | Active Site |
| S265R | S262R | 187 | Active Site |
| S265T | S262T | 188 | Active Site |
| S265W | S262W | 189 | Active Site |
| S265Y | S262Y | 190 | Active Site |
| H267C | H264C | 191 | Active Site |
| H267D | H264D | 192 | Active Site |
| H267E | H264E | 193 | Active Site |
| H267F | H264F | 194 | Active Site |
| H267I | H264I | 195 | Active Site |
| H267K | H264K | 196 | Active Site |
| H267L | H264L | 197 | Active Site |
| H267M | H264M | 198 | Active Site |
| H267P | H264P | 199 | Active Site |
| H267R | H264R | 200 | Active Site |
| H267S | H264S | 201 | Active Site |
| H267T | H264T | 202 | Active Site |
| H267V | H264V | 203 | Active Site |
| H267W | H264W | 204 | Active Site |
| H267Y | H264Y | 205 | Active Site |
| S269A | S266A | 206 | Active Site |
| S269C | S266C | 207 | Active Site |
| S269D | S266D | 208 | Active Site |
| S269E | S266E | 209 | Active Site |
| S269F | S266F | 210 | Active Site |
| S269G | S266G | 211 | Active Site |
| S269H | S266H | 212 | Active Site |
| S269I | S266I | 213 | Active Site |
| S269K | S266K | 214 | Active Site |
| S269L | S266L | 215 | Active Site |
| S269M | S266M | 216 | Active Site |
| S269N | S266N | 217 | Active Site |
| S269P | S266P | 218 | Active Site |
| S269Q | S266Q | 219 | Active Site |
| S269R | S266R | 220 | Active Site |
| S269T | S266T | 221 | Active Site |
| S269V | S266V | 222 | Active Site |
| S269W | S266W | 223 | Active Site |
| S269Y | S266Y | 224 | Active Site |
| K270A | K267A | 225 | Active Site |
| K270C | K267C | 226 | Active Site |
| K270D | K267D | 227 | Active Site |
| K270E | K267E | 228 | Active Site |
| K270F | K267F | 229 | Active Site |
| K270G | K267G | 230 | Active Site |
| K270H | K267H | 231 | Active Site |
| K270I | K267I | 232 | Active Site |
| K270L | K267L | 233 | Active Site |
| K270M | K267M | 234 | Active Site |
| K270N | K267N | 235 | Active Site |
| K270P | K267P | 236 | Active Site |
| K270Q | K267Q | 237 | Active Site |
| K270R | K267R | 238 | Active Site |
| K270S | K267S | 239 | Active Site |
| K270T | K267T | 240 | Active Site |
| K270V | K267V | 241 | Active Site |
| K270W | K267W | 242 | Active Site |
| K270Y | K267Y | 243 | Active Site |
| V299A | V296A | 244 | Active Site |
| V299C | V296C | 245 | Active Site |
| V299D | V296D | 246 | Active Site |
| V299E | V296E | 247 | Active Site |
| V299F | V296F | 248 | Active Site |
| V299G | V296G | 249 | Active Site |
| V299H | V296H | 250 | Active Site |
| V299I | V296I | 251 | Active Site |
| V299K | V296K | 252 | Active Site |
| V299L | V296L | 253 | Active Site |
| V299M | V296M | 254 | Active Site |
| V299N | V296N | 255 | Active Site |
| V299P | V296P | 256 | Active Site |
| V299Q | V296Q | 257 | Active Site |
| V299R | V296R | 258 | Active Site |
| V299S | V296S | 259 | Active Site |
| V299T | V296T | 260 | Active Site |
| V299W | V296W | 261 | Active Site |
| V299Y | V296Y | 262 | Active Site |
| R222Q/K374E | R219Q/K371E | 263 | Combination |
| R222Q/K374D | R219Q/K371D | 264 | Combination |
| R222Q/R23E | R219Q/R20E | 265 | Combination |
| R222Q/K374E/R23E | R219Q/K371E/R20E | 266 | Combination |
| R222Q/K374D/R23E | R219Q/K371D/R20E | 267 | Combination |
| R222Q/S265N/K374E | R219Q/S262N/K371E | 268 | Combination |
| R222Q/S265N/K374D | R219Q/S262N/K371D | 269 | Combination |
| R222Q/S265N/R23E | R219Q/S262N/R20E | 270 | Combination |
| R222Q/S265N/K374E/R23E | R219Q/S262N/K371E/R20E | 271 | Combination |
| R222Q/S265N/K374D/R23E | R219Q/S262N/K371D/R20E | 272 | Combination |
| R222Q/S265N | R219Q/S262N | 273 | Combination |
| ——→N4/——→A5/——→S6 | ——→N1/——→A2/——→S3 | 274 | Hyperglycosylation |
| R23N/V25S | R20N/V22S | 275 | Hyperglycosylation |
| K374N/D376S | K371N/D373S | 276 | Hyperglycosylation |
| K375N/I377S | K372N/I374S | 277 | Hyperglycosylation |
| T406N/H408S | T403N/H405S | 278 | Hyperglycosylation |
| G407N/P409S | G404N/P406S | 279 | Hyperglycosylation |
| C108-T150del→(Gly)ₙ | C105-T147del→(Gly)ₙ | 280 | PRB deletion |
| C108-T150del→(Gly)₁₅ | C105-T147del→(Gly)₁₅ | 281 | PRB deletion |
| C108-T150del→(Gly)₁₀ | C105-T147del→(Gly)₁₀ | 282 | PRB deletion |
| C108-T150del→(Gly)₇ | C105-T147del→(Gly)₇ | 283 | PRB deletion |
| C108-T150del→(Gly)₅ | C105-T147del→(Gly)₅ | 284 | PRB deletion |
| C108-T150del→(Gly)₃ | C105-T147del→(Gly)₃ | 285 | PRB deletion |
| N101-N159del | N98-N156del | 548 | PRB deletion |
| C108-E151del | C105-E148del | 549 | PRB deletion |
| C108-T150del | C105-T147del | 550 | PRB deletion |
| R128N/P129A | R125N/P126A | 552 | PRB |
| | | | hyperglycosylation |
| S130N/K132S | S127N/K129S | 553 | PRB |
| | | | hyperglycosylation |
| P129N/E131T | P126N/E128T | 554 | PRB |
| | | | hyperglycosylation |
| R115N/I117T | R112N/I114T | 555 | PRB |
| | | | hyperglycosylation |
| I137N/L138C/L139T | I134N/L135C/L136T | 556 | PRB |
| | | | hyperglycosylation |
| I137N/L138S/L139T | I134N/L135S/L136T | 557 | PRB |
| | | | hyperglycosylation |
| R145N/Q147S | R142N/Q144S | 558 | PRB |
| | | | hyperglycosylation |
| E140N/Y142T | E137N/Y139T | 559 | PRB |
| | | | hyperglycosylation |
| P114N/G116S | P111N/G113S | 560 | PRB |
| | | | hyperglycosylation |
| F122S | F119S | 561 | PRB-ADA |
| | | | interaction |
| F122K | F119K | 562 | PRB-ADA |
| | | | interaction |
| Y227R | Y224R | 563 | PRB-ADA |
| | | | interaction |
| Y227N | Y224N | 564 | PRB-ADA |
| | | | interaction |
| Y194S | Y191S | 565 | PRB-ADA |
| | | | interaction |
| Y194D | Y191D | 566 | PRB-ADA |
| | | | interaction |
| F186K | F183K | 567 | PRB-ADA |
| | | | interaction |
| Y194D/Y227R | Y191D/Y224R | 568 | PRB-ADA |
| | | | interaction |
| F112S | F109S | 569 | PRB-ADA |
| | | | interaction |
| F112A | F109A | 570 | PRB-ADA |
| | | | interaction |
| R121D | R118D | 571 | PRB-ADA |
| | | | interaction |
| R121A | R118A | 572 | PRB-ADA |
| | | | interaction |
| Y142T | Y139T | 573 | PRB-ADA |
| | | | interaction |
| Y142A | Y139A | 574 | PRB-ADA |
| | | | interaction |
| W136S | W133S | 575 | PRB-ADA |
| | | | interaction |
| W136T | W133T | 576 | PRB-ADA |
| | | | interaction |
| P127A | P124A | 577 | PRB-ADA |
| | | | interaction |
| P127S | P124S | 578 | PRB-ADA |
| | | | interaction |
| V102-Q147del | V99-Q144del | 579 | PRB deletion |
| V102-Q147del→(GGGGS)n | V99-Q144del→(GGGGS)n | 581 | PRB deletion |
| C108-T150del→(GGGGS)n | C105-T147del→(GGGGS)n | 582 | PRB deletion |
| V102-Q147del→(GGGGS)₁ | V99-Q144del→(GGGGS)₁ | 583 | PRB deletion |
| V102-Q147del→(GGGGS)₂ | V99-Q144del→(GGGGS)₂ | 584 | PRB deletion |
| V102-Q147del→(GGGGS)₃ | V99-Q144del→(GGGGS)₃ | 585 | PRB deletion |
| C108-T150del→(GGGGS)₁ | C105-T147del→(GGGGS)₁ | 586 | PRB deletion |
| C108-T150del→(GGGGS)₂ | C105-T147del→(GGGGS)₂ | 587 | PRB deletion |
| C108-T150del→(GGGGS)₃ | C105-T147del→(GGGGS)₃ | 588 | PRB deletion |
| K374D/V102- | K371D/V99- | 589 | Combination w/ |
| Q147del→(GGGGS)₁ | Q144del→(GGGGS)₁ | | PRB deletion |
| K374D/V102- | K371D/V99- | 590 | Combination w/ |
| Q147del→(GGGGS)₂ | Q144del→(GGGGS)₂ | | PRB deletion |
| K374D/V102- | K371D/V99- | 591 | Combination w/ |
| Q147del→(GGGGS)₃ | Q144del→(GGGGS)₃ | | PRB deletion |
| K374D/C108- | K371D/C105- | 592 | Combination w/ |
| T150del→(GGGGS)₁ | T147del→(GGGGS)₁ | | PRB deletion |
| K374D/C108- | K371D/C105- | 593 | Combination w/ |
| T150del→(GGGGS)₂ | T147del→(GGGGS)₂ | | PRB deletion |
| K374D/C108- | K371D/C105- | 594 | Combination w/ |
| T150del→(GGGGS)₃ | T147del→(GGGGS)₃ | | PRB deletion |
| R222Q/S265N/——→N4/ | R219Q/S262N/——→N1/ | 596 | Combination w/ |
| ——→A5/——→S6 | ——→A2/——→S3 | | hyperglycosylation |
| R222Q/S265N/R23N/V25S | R219Q/S262N/R20N/V22S | 597 | Combination w/ |
| | | | hyperglycosylation |
| R222Q/S265N/K374N/D376S | R219Q/S262N/K371N/D373S | 598 | Combination w/ |
| | | | hyperglycosylation |
| R222Q/S265N/K375N/I377S | R219Q/S262N/K372N/I374S | 599 | Combination w/ |
| | | | hyperglycosylation |
| R222Q/S265N/T406N/H408S | R219Q/S262N/T403N/H405S | 600 | Combination w/ |
| | | | hyperglycosylation |
| R222Q/S265N/G407N/P409S | R219Q/S262N/G404N/P406S | 601 | Combination w/ |
| | | | hyperglycosylation |
| R222Q/S265N/C108- | R219Q/S262N/C105- | 602 | Combination w/ |
| T150del→(Gly)₁₅ | T147del→(Gly)₁₅ | | PRB deletion |
| R222Q/S265N/C108- | R219Q/S262N/C105- | 603 | Combination w/ |
| T150del→(Gly)₁₀ | T147del→(Gly)₁₀ | | PRB deletion |
| R222Q/S265N/C108- | R219Q/S262N/C105- | 604 | Combination w/ |
| T150del→(Gly)₇ | T147del→(Gly)₇ | | PRB deletion |
| R222Q/S265N/C108- | R219Q/S262N/C105- | 605 | Combination w/ |
| T150del→(Gly)₅ | T147del→(Gly)₅ | | PRB deletion |
| R222Q/S265N/C108- | R219Q/S262N/C105- | 606 | Combination w/ |
| T150del→(Gly)₃ | T147del→(Gly)₃ | | PRB deletion |
| R222Q/S265N/R128N/P129A | R219Q/S262N/R125N/P126A | 607 | Combination w/ |
| | | | PRB |
| | | | hyperglycosylation |
| R222Q/S265N/S130N/K132S | R219Q/S262N/S127N/K129S | 608 | Combination w/ |
| | | | PRB |
| | | | hyperglycosylation |
| R222Q/S265N/P129N/E131T | R219Q/S262N/P126N/E128T | 609 | Combination w/ |
| | | | PRB |
| | | | hyperglycosylation |
| R222Q/S265N/R115N/I117T | R219Q/S262N/R112N/I114T | 610 | Combination w/ |
| | | | PRB |
| | | | hyperglycosylation |
| R222Q/S265N/I137N/ | R219Q/S262N/I134N/ | 611 | Combination w/ |
| L138C/L139T | L135C/L136T | | PRB |
| | | | hyperglycosylation |
| R222Q/S265N/I137N/ | R219Q/S262N/I134N/ | 612 | Combination w/ |
| L138S/L139T | L135S/L136T | | PRB |
| | | | hyperglycosylation |
| R222Q/S265N/R145N/Q147S | R219Q/S262N/R142N/Q144S | 613 | Combination w/ |
| | | | PRB |
| | | | hyperglycosylation |
| R222Q/S265N/E140N/Y142T | R219Q/S262N/E137N/Y139T | 614 | Combination w/ |
| | | | PRB |
| | | | hyperglycosylation |
| R222Q/S265N/P114N/G116S | R219Q/S262N/P111N/G113S | 615 | Combination w/ |
| | | | PRB |
| | | | hyperglycosylation |
| R222Q/S265N/F122S | R219Q/S262N/F119S | 616 | Combination w/ |
| | | | PRB-ADA |
| | | | interaction |
| R222Q/S265N/F122K | R219Q/S262N/F119K | 617 | Combination w/ |
| | | | PRB-ADA |
| | | | interaction |
| R222Q/S265N/Y227R | R219Q/S262N/Y224R | 618 | Combination w/ |
| | | | PRB-ADA |
| | | | interaction |
| R222Q/S265N/Y227N | R219Q/S262N/Y224N | 619 | Combination w/ |
| | | | PRB-ADA |
| | | | interaction |
| R222Q/S265N/Y194S | R219Q/S262N/Y191S | 620 | Combination w/ |
| | | | PRB-ADA |
| | | | interaction |
| R222Q/S265N/Y194D | R219Q/S262N/Y191D | 621 | Combination w/ |
| | | | PRB-ADA |
| | | | interaction |
| R222Q/S265N/F186K | R219Q/S262N/F183K | 622 | Combination w/ |
| | | | PRB-ADA |
| | | | interaction |
| R222Q/S265N/Y194D/Y227R | R219Q/S262N/Y191D/Y224R | 623 | Combination w/ |
| | | | PRB-ADA |
| | | | interaction |
| R222Q/S265N/F112S | R219Q/S262N/F109S | 624 | Combination w/ |
| | | | PRB-ADA |
| | | | interaction |
| R222Q/S265N/F112A | R219Q/S262N/F109A | 625 | Combination w/ |
| | | | PRB-ADA |
| | | | interaction |
| R222Q/S265N/R121D | R219Q/S262N/R118D | 626 | Combination w/ |
| | | | PRB-ADA |
| | | | interaction |
| R222Q/S265N/R121A | R219Q/S262N/R118A | 627 | Combination w/ |
| | | | PRB-ADA |
| | | | interaction |
| R222Q/S265N/Y142T | R219Q/S262N/Y139T | 628 | Combination w/ |
| | | | PRB-ADA |
| | | | interaction |
| R222Q/S265N/Y142A | R219Q/S262N/Y139A | 629 | Combination w/ |
| | | | PRB-ADA |
| | | | interaction |
| R222Q/S265N/W136S | R219Q/S262N/W133S | 630 | Combination w/ |
| | | | PRB-ADA |
| | | | interaction |
| R222Q/S265N/W136T | R219Q/S262N/W133T | 631 | Combination w/ |
| | | | PRB-ADA |
| | | | interaction |
| R222Q/S265N/P127A | R219Q/S262N/P124A | 632 | Combination w/ |
| | | | PRB-ADA |
| | | | interaction |
| R222Q/S265N/P127S | R219Q/S262N/P124S | 633 | Combination w/ |
| | | | PRB-ADA |
| | | | interaction |
| R222Q/S265N/V102- | R219Q/S262N/V99- | 634 | Combination w/ |
| Q147del→(GGGGS)₁ | Q144del→(GGGGS)₁ | | PRB deletion |
| R222Q/S265N/V102- | R219Q/S262N/V99- | 635 | Combination w/ |
| Q147del→(GGGGS)₂ | Q144del→(GGGGS)₂ | | PRB deletion |
| R222Q/S265N/V102- | R219Q/S262N/V99- | 636 | Combination w/ |
| Q147del→(GGGGS)₃ | Q144del→(GGGGS)₃ | | PRB deletion |
| R222Q/S265N/C108- | R219Q/S262N/C105- | 637 | Combination w/ |
| T150del→(GGGGS)₁ | T147del→(GGGGS)₁ | | PRB deletion |
| R222Q/S265N/C108- | R219Q/S262N/C105- | 638 | Combination w/ |
| T150del→(GGGGS)₂ | T147del→(GGGGS)₂ | | PRB deletion |
| R222Q/S265N/C108- | R219Q/S262N/C105- | 639 | Combination w/ |
| T150del→(GGGGS)₃ | T147del→(GGGGS)₃ | | PRB deletion |
| R222Q/S265N/K374D/V102- | R219Q/S262N/K371D/V99- | 640 | Combination w/ |
| Q147del→(GGGGS)₁ | Q144del→(GGGGS)₁ | | PRB deletion |
| R222Q/S265N/K374D/V102- | R219Q/S262N/K371D/V99- | 641 | Combination w/ |
| Q147del→(GGGGS)₂ | Q144del→(GGGGS)₂ | | PRB deletion |
| R222Q/S265N/K374D/V102- | R219Q/S262N/K371D/V99- | 642 | Combination w/ |
| Q147del→(GGGGS)₃ | Q144del→(GGGGS)₃ | | PRB deletion |
| R222Q/S265N/K374D/C108- | R219Q/S262N/K371D/C105- | 643 | Combination w/ |
| T150del→(GGGGS)₁ | T147del→(GGGGS)₁ | | PRB deletion |
| R222Q/S265N/K374D/C108- | R219Q/S262N/K371D/C105- | 644 | Combination w/ |
| T150del→(GGGGS)₂ | T147del→(GGGGS)₂ | | PRB deletion |
| R222Q/S265N/K374D/C108- | R219Q/S262N/K371D/C105- | 645 | Combination w/ |
| T150del→(GGGGS)₃ | T147del→(GGGGS)₃ | | PRB deletion |
| K374D/C108- | K371D/C105- | 646 | Combination w/ |
| T150del→(Gly)n | T147del→(Gly)n | | PRB deletion |
| K374D/C108- | K371D/C105- | 647 | Combination w/ |
| T150del→(Gly)₁₅ | T147del→(Gly)₁₅ | | PRB deletion |
| K374D/C108- | K371D/C105- | 648 | Combination w/ |
| T150del→(Gly)₁₀ | T147del→(Gly)₁₀ | | PRB deletion |
| K374D/C108- | K371D/C105- | 649 | Combination w/ |
| T150del→(Gly)₇ | T147del→(Gly)₇ | | PRB deletion |
| K374D/C108- | K371D/C105- | 650 | Combination w/ |
| T150del→(Gly)₅ | T147del→(Gly)₅ | | PRB deletion |
| K374D/C108- | K371D/C105- | 651 | Combination w/ |
| T150del→(Gly)₃ | T147del→(Gly)₃ | | PRB deletion |
| K374D/V102- | K371D/V99- | 652 | Combination w/ |
| Q147del→(GGGGS)n | Q144del→(GGGGS)n | | PRB deletion |
| K374D/C108- | K371D/C105- | 653 | Combination w/ |
| T150del→(GGGGS)n | T147del→(GGGGS)n | | PRB deletion |
| K374D/N101-N159del | K371D/N98-N156del | 654 | Combination w/ |
| | | | PRB deletion |
| K374D/C108-E151del | K371D/C105-E148del | 655 | Combination w/ |
| | | | PRB deletion |
| K374D/C108-T150del | K371D/C105-T147del | 656 | Combination w/ |
| | | | PRB deletion |
| K374D/V102-Q147del | K371D/V99-Q144del | 657 | Combination w/ |
| | | | PRB deletion |
| R222Q/S265N/C108- | R219Q/S262N/C105- | 658 | Combination w/ |
| T150del→(Gly)n | T147del→(Gly)n | | PRB deletion |
| R222Q/S265N/K14A | R219Q/S262N/K11A | 659 | Combination |
| R222Q/S265N/K14D | R219Q/S262N/K11D | 660 | Combination |
| R222Q/S265N/K14E | R219Q/S262N/K11E | 661 | Combination |
| R222Q/S265N/K16A | R219Q/S262N/K13A | 662 | Combination |
| R222Q/S265N/K16D | R219Q/S262N/K13D | 663 | Combination |
| R222Q/S265N/V102- | R219Q/S262N/V99- | 664 | Combination w/ |
| Q147del→(GGGGS)n | Q144del→(GGGGS)n | | PRB deletion |
| R222Q/S265N/C108- | R219Q/S262N/C105- | 665 | Combination w/ |
| T150del→(GGGGS)n | T147del→(GGGGS)n | | PRB deletion |
| R222Q/S265N/N101-N159del | R219Q/S262N/N98-N156del | 666 | Combination w/ |
| | | | PRB deletion |
| R222Q/S265N/C108-E151del | R219Q/S262N/C105-E148del | 667 | Combination w/ |
| | | | PRB deletion |
| R222Q/S265N/C108-T150del | R219Q/S262N/C105-T147del | 668 | Combination w/ |
| | | | PRB deletion |
| R222Q/S265N/V102-Q147del | R219Q/S262N/V99-Q144del | 669 | Combination w/ |
| | | | PRB deletion |
| R222Q/S265N/K374D/C108- | R219Q/S262N/K371D/C105- | 670 | Combination w/ |
| T150del→(Gly)n | T147del→(Gly)n | | PRB deletion |
| R222Q/S265N/K374D/C108- | R219Q/S262N/K371D/C105- | 671 | Combination w/ |
| T150del→(Gly)₁₅ | T147del→(Gly)₁₅ | | PRB deletion |
| R222Q/S265N/K374D/C108- | R219Q/S262N/K371D/C105- | 672 | Combination w/ |
| T150del→(Gly)₁₀ | T147del→(Gly)₁₀ | | PRB deletion |
| R222Q/S265N/K374D/C108- | R219Q/S262N/K371D/C105- | 673 | Combination w/ |
| T150del→(Gly)₇ | T147del→(Gly)₇ | | PRB deletion |
| R222Q/S265N/K374D/C108- | R219Q/S262N/K371D/C105- | 674 | Combination w/ |
| T150del→(Gly)₅ | T147del→(Gly)₅ | | PRB deletion |
| R222Q/S265N/K374D/C108- | R219Q/S262N/K371D/C105- | 675 | Combination w/ |
| T150del→(Gly)₃ | T147del→(Gly)₃ | | PRB deletion |
| R222Q/S265N/K374D/V102- | R219Q/S262N/K371D/V99- | 676 | Combination w/ |
| Q147del→(GGGGS)n | Q144del→(GGGGS)n | | PRB deletion |
| R222Q/S265N/K374D/C108- | R219Q/S262N/K371D/C105- | 677 | Combination w/ |
| T150del→(GGGGS)n | T147del→(GGGGS)n | | PRB deletion |
| R222Q/S265N/K374D/N101- | R219Q/S262N/K371D/N98- | 678 | Combination w/ |
| N159del | N156del | | PRB deletion |
| R222Q/S265N/K374D/C108- | R219Q/S262N/K371D/C105- | 679 | Combination w/ |
| E151del | E148del | | PRB deletion |
| R222Q/S265N/K374D/C108- | R219Q/S262N/K371D/C105- | 680 | Combination w/ |
| T150del | T147del | | PRB deletion |
| R222Q/S265N/K374D/V102- | R219Q/S262N/K371D/V99- | 681 | Combination w/ |
| Q147del | Q144del | | PRB deletion |
| R222Q/S265N/K16E | R219Q/S262N/K13E | 682 | Combination |
| R222Q/S265N/K374A | R219Q/S262N/K371A | 683 | Combination |
| R222Q/S265N/K375A | R219Q/S262N/K372A | 684 | Combination |
| R222Q/S265N/K375D | R219Q/S262N/K372D | 685 | Combination |
| R222Q/S265N/K375E | R219Q/S262N/K372E | 686 | Combination |
| R222Q/S265N/K455A | R219Q/S262N/K452A | 687 | Combination |
| R222Q/S265N/K455D | R219Q/S262N/K452D | 688 | Combination |
| R222Q/S265N/K455E | R219Q/S262N/K452E | 689 | Combination |
| R222Q/S265N/R23A | R219Q/S262N/R20A | 690 | Combination |
| R222Q/S265N/R23D | R219Q/S262N/R20D | 691 | Combination |
| R222Q/S265N/R369A | R219Q/S262N/R366A | 692 | Combination |
| R222Q/S265N/R369D | R219Q/S262N/R366D | 693 | Combination |
| R222Q/S265N/R369E | R219Q/S262N/R366E | 694 | Combination |
| R222Q/S265N/H267A | R219Q/S262N/H264A | 695 | Combination |
| R222Q/S265N/H267Q | R219Q/S262N/H264Q | 696 | Combination |
| R222Q/S265N/H267N | R219Q/S262N/H264N | 697 | Combination |
| R222Q/S265N/H267G | R219Q/S262N/H264G | 698 | Combination |
| R222K/S265N | R219K/S262N | 699 | Combination |
| R222N/S265N | R219N/S262N | 700 | Combination |
| R222A/S265N | R219A/S262N | 701 | Combination |
| R222Q/S265N/L224A | R219Q/S262N/L221A | 702 | Combination |
| R222Q/S265N/L224V | R219Q/S262N/L221V | 703 | Combination |
| R222Q/S265N/L224G | R219Q/S262N/L221G | 704 | Combination |
| R222Q/S265N/E182D | R219Q/S262N/E179D | 705 | Combination |
| R222Q/S265N/E182A | R219Q/S262N/E179A | 706 | Combination |
| R222Q/S265N/E182S | R219Q/S262N/E179S | 707 | Combination |
| R222Q/S265N/E182T | R219Q/S262N/E179T | 708 | Combination |
| R222Q/S265N/E182V | R219Q/S262N/E179V | 709 | Combination |
| R222Q/S265N/E182G | R219Q/S262N/E179G | 710 | Combination |
| R222Q/S265A | R219Q/S262A | 711 | Combination |
| R222Q/S265V | R219Q/S262V | 712 | Combination |
| R222Q/S265M | R219Q/S262M | 713 | Combination |
| R222Q/S265N/K14A/R23A | R219Q/S262N/K11A/R20A | 714 | Combination |
| R222Q/S265N/K14A/R23A/K374A | R219Q/S262N/K11A/R20A/K371A | 715 | Combination |
| R222Q/S265N/R23A/K374A | R219Q/S262N/R20A/K371A | 716 | Combination |
| R222Q/S265N/K14A/K374A | R219Q/S262N/K11A/K371A | 717 | Combination |
| R222Q/S265N/K29A | R219Q/S262N/K26A | 718 | Combination |
| R222Q/S265N/K29D | R219Q/S262N/K26D | 719 | Combination |
| R222Q/S265N/K29E | R219Q/S262N/K26E | 720 | Combination |
| R222Q/S265N/R220A | R219Q/S262N/R217A | 721 | Combination |
| R222Q/S265N/R220D | R219Q/S262N/R217D | 722 | Combination |
| R222Q/S265N/R220E | R219Q/S262N/R217E | 723 | Combination |
| R222Q/S265N/K261A | R219Q/S262N/K258A | 724 | Combination |
| R222Q/S265N/K261D | R219Q/S262N/K258D | 725 | Combination |
| R222Q/S265N/K261E | R219Q/S262N/K258E | 726 | Combination |
| R222Q/S265N/R280A | R219Q/S262N/R277A | 727 | Combination |
| R222Q/S265N/R280D | R219Q/S262N/R277D | 728 | Combination |
| R222Q/S265N/R280E | R219Q/S262N/R277E | 729 | Combination |
| R222Q/S265N/R286A | R219Q/S262N/R283A | 730 | Combination |
| R222Q/S265N/R286D | R219Q/S262N/R283D | 731 | Combination |
| R222Q/S265N/R286E | R219Q/S262N/R283E | 732 | Combination |
| R222Q/S265N/K312A | R219Q/S262N/K309A | 733 | Combination |
| R222Q/S265N/K312D | R219Q/S262N/K309D | 734 | Combination |
| R222Q/S265N/K312E | R219Q/S262N/K309E | 735 | Combination |
| R222Q/S265N/K320A | R219Q/S262N/K317A | 736 | Combination |
| R222Q/S265N/K320D | R219Q/S262N/K317D | 737 | Combination |
| R222Q/S265N/K320E | R219Q/S262N/K317E | 738 | Combination |
| R222Q/S265N/K324A | R219Q/S262N/K321A | 739 | Combination |
| R222Q/S265N/K324D | R219Q/S262N/K321D | 740 | Combination |
| R222Q/S265N/K324E | R219Q/S262N/K321E | 741 | Combination |
| R222Q/S265N/R355A | R219Q/S262N/R352A | 742 | Combination |
| R222Q/S265N/R355D | R219Q/S262N/R352D | 743 | Combination |
| R222Q/S265N/R355E | R219Q/S262N/R352E | 744 | Combination |
| R222Q/S265N/R444A | R219Q/S262N/R441A | 745 | Combination |
| R222Q/S265N/R444D | R219Q/S262N/R441D | 746 | Combination |
| R222Q/S265N/R444E | R219Q/S262N/R441E | 747 | Combination |
| R222Q/S265N/K447A | R219Q/S262N/K444A | 748 | Combination |
| R222Q/S265N/K447D | R219Q/S262N/K444D | 749 | Combination |
| R222Q/S265N/K447E | R219Q/S262N/K444E | 750 | Combination |
| R222Q/S265N/K464A | R219Q/S262N/K461A | 751 | Combination |
| R222Q/S265N/K464D | R219Q/S262N/K461D | 752 | Combination |
| R222Q/S265N/K464E | R219Q/S262N/K461E | 753 | Combination |
| R222Q/S265N/K472A | R219Q/S262N/K469A | 754 | Combination |
| R222Q/S265N/K472D | R219Q/S262N/K469D | 755 | Combination |
| R222Q/S265N/K472E | R219Q/S262N/K469E | 756 | Combination |
| R222Q/S265N/K473A | R219Q/S262N/K470A | 757 | Combination |
| R222Q/S265N/K473D | R219Q/S262N/K470D | 758 | Combination |
| R222Q/S265N/K473E | R219Q/S262N/K470E | 759 | Combination |
| R222Q/S265N/D89A | R219Q/S262N/D86A | 760 | Combination |
| R222Q/S265N/D89C | R219Q/S262N/D86C | 761 | Combination |
| R222Q/S265N/D89E | R219Q/S262N/D86E | 762 | Combination |
| R222Q/S265N/D89F | R219Q/S262N/D86F | 763 | Combination |
| R222Q/S265N/D89G | R219Q/S262N/D86G | 764 | Combination |
| R222Q/S265N/D89H | R219Q/S262N/D86H | 765 | Combination |
| R222Q/S265N/D89I | R219Q/S262N/D86I | 766 | Combination |
| R222Q/S265N/D89K | R219Q/S262N/D86K | 767 | Combination |
| R222Q/S265N/D89L | R219Q/S262N/D86L | 768 | Combination |
| R222Q/S265N/D89M | R219Q/S262N/D86M | 769 | Combination |
| R222Q/S265N/D89N | R219Q/S262N/D86N | 770 | Combination |
| R222Q/S265N/D89P | R219Q/S262N/D86P | 771 | Combination |
| R222Q/S265N/D89Q | R219Q/S262N/D86Q | 772 | Combination |
| R222Q/S265N/D89R | R219Q/S262N/D86R | 773 | Combination |
| R222Q/S265N/D89S | R219Q/S262N/D86S | 774 | Combination |
| R222Q/S265N/D89T | R219Q/S262N/D86T | 775 | Combination |
| R222Q/S265N/D89V | R219Q/S262N/D86V | 776 | Combination |
| R222Q/S265N/D89W | R219Q/S262N/D86W | 777 | Combination |
| R222Q/S265N/D89Y | R219Q/S262N/D86Y | 778 | Combination |
| R222Q/S265N/E182C | R219Q/S262N/E179C | 779 | Combination |
| R222Q/S265N/E182F | R219Q/S262N/E179F | 780 | Combination |
| R222Q/S265N/E182H | R219Q/S262N/E179H | 781 | Combination |
| R222Q/S265N/E182I | R219Q/S262N/E179I | 782 | Combination |
| R222Q/S265N/E182K | R219Q/S262N/E179K | 783 | Combination |
| R222Q/S265N/E182L | R219Q/S262N/E179L | 784 | Combination |
| R222Q/S265N/E182M | R219Q/S262N/E179M | 785 | Combination |
| R222Q/S265N/E182N | R219Q/S262N/E179N | 786 | Combination |
| R222Q/S265N/E182P | R219Q/S262N/E179P | 787 | Combination |
| R222Q/S265N/E182Q | R219Q/S262N/E179Q | 788 | Combination |
| R222Q/S265N/E182R | R219Q/S262N/E179R | 789 | Combination |
| R222Q/S265N/E182W | R219Q/S262N/E179W | 790 | Combination |
| R222Q/S265N/E182Y | R219Q/S262N/E179Y | 791 | Combination |
| R222C/S265N | R219C/S262N | 792 | Combination |
| R222D/S265N | R219D/S262N | 793 | Combination |
| R222E/S265N | R219E/S262N | 794 | Combination |
| R222F/S265N | R219F/S262N | 795 | Combination |
| R222G/S265N | R219G/S262N | 796 | Combination |
| R222H/S265N | R219H/S262N | 797 | Combination |
| R222I/S265N | R219I/S262N | 798 | Combination |
| R222L/S265N | R219L/S262N | 799 | Combination |
| R222M/S265N | R219M/S262N | 800 | Combination |
| R222P/S265N | R219P/S262N | 801 | Combination |
| R222S/S265N | R219S/S262N | 802 | Combination |
| R222T/S265N | R219T/S262N | 803 | Combination |
| R222V/S265N | R219V/S262N | 804 | Combination |
| R222W/S265N | R219W/S262N | 805 | Combination |
| R222Y/S265N | R219Y/S262N | 806 | Combination |
| R222Q/S265N/L224C | R219Q/S262N/L221C | 807 | Combination |
| R222Q/S265N/L224D | R219Q/S262N/L221D | 808 | Combination |
| R222Q/S265N/L224E | R219Q/S262N/L221E | 809 | Combination |
| R222Q/S265N/L224F | R219Q/S262N/L221F | 810 | Combination |
| R222Q/S265N/L224H | R219Q/S262N/L221H | 811 | Combination |
| R222Q/S265N/L224I | R219Q/S262N/L221I | 812 | Combination |
| R222Q/S265N/L224K | R219Q/S262N/L221K | 813 | Combination |
| R222Q/S265N/L224M | R219Q/S262N/L221M | 814 | Combination |
| R222Q/S265N/L224N | R219Q/S262N/L221N | 815 | Combination |
| R222Q/S265N/L224P | R219Q/S262N/L221P | 816 | Combination |
| R222Q/S265N/L224Q | R219Q/S262N/L221Q | 817 | Combination |
| R222Q/S265N/L224R | R219Q/S262N/L221R | 818 | Combination |
| R222Q/S265N/L224S | R219Q/S262N/L221S | 819 | Combination |
| R222Q/S265N/L224T | R219Q/S262N/L221T | 820 | Combination |
| R222Q/S265N/L224W | R219Q/S262N/L221W | 821 | Combination |
| R222Q/S265N/L224Y | R219Q/S262N/L221Y | 822 | Combination |
| R222Q/S265C | R219Q/S262C | 823 | Combination |
| R222Q/S265D | R219Q/S262D | 824 | Combination |
| R222Q/S265E | R219Q/S262E | 825 | Combination |
| R222Q/S265F | R219Q/S262F | 826 | Combination |
| R222Q/S265G | R219Q/S262G | 827 | Combination |
| R222Q/S265H | R219Q/S262H | 828 | Combination |
| R222Q/S265I | R219Q/S262I | 829 | Combination |
| R222Q/S265K | R219Q/S262K | 830 | Combination |
| R222Q/S265L | R219Q/S262L | 831 | Combination |
| R222Q/S265P | R219Q/S262P | 832 | Combination |
| R222Q/S265Q | R219Q/S262Q | 833 | Combination |
| R222Q/S265R | R219Q/S262R | 834 | Combination |
| R222Q/S265T | R219Q/S262T | 835 | Combination |
| R222Q/S265W | R219Q/S262W | 836 | Combination |
| R222Q/S265Y | R219Q/S262Y | 837 | Combination |
| R222Q/S265N/H267C | R219Q/S262N/H264C | 838 | Combination |
| R222Q/S265N/H267D | R219Q/S262N/H264D | 839 | Combination |
| R222Q/S265N/H267E | R219Q/S262N/H264E | 840 | Combination |
| R222Q/S265N/H267F | R219Q/S262N/H264F | 841 | Combination |
| R222Q/S265N/H267I | R219Q/S262N/H264I | 842 | Combination |
| R222Q/S265N/H267K | R219Q/S262N/H264K | 843 | Combination |
| R222Q/S265N/H267L | R219Q/S262N/H264L | 844 | Combination |
| R222Q/S265N/H267M | R219Q/S262N/H264M | 845 | Combination |
| R222Q/S265N/H267P | R219Q/S262N/H264P | 846 | Combination |
| R222Q/S265N/H267R | R219Q/S262N/H264R | 847 | Combination |
| R222Q/S265N/H267S | R219Q/S262N/H264S | 848 | Combination |
| R222Q/S265N/H267T | R219Q/S262N/H264T | 849 | Combination |
| R222Q/S265N/H267V | R219Q/S262N/H264V | 850 | Combination |
| R222Q/S265N/H267W | R219Q/S262N/H264W | 851 | Combination |
| R222Q/S265N/H267Y | R219Q/S262N/H264Y | 852 | Combination |
| R222Q/S265N/S269A | R219Q/S262N/S266A | 853 | Combination |
| R222Q/S265N/S269C | R219Q/S262N/S266C | 854 | Combination |
| R222Q/S265N/S269D | R219Q/S262N/S266D | 855 | Combination |
| R222Q/S265N/S269E | R219Q/S262N/S266E | 856 | Combination |
| R222Q/S265N/S269F | R219Q/S262N/S266F | 857 | Combination |
| R222Q/S265N/S269G | R219Q/S262N/S266G | 858 | Combination |
| R222Q/S265N/S269H | R219Q/S262N/S266H | 859 | Combination |
| R222Q/S265N/S269I | R219Q/S262N/S266I | 860 | Combination |
| R222Q/S265N/S269K | R219Q/S262N/S266K | 861 | Combination |
| R222Q/S265N/S269L | R219Q/S262N/S266L | 862 | Combination |
| R222Q/S265N/S269M | R219Q/S262N/S266M | 863 | Combination |
| R222Q/S265N/S269N | R219Q/S262N/S266N | 864 | Combination |
| R222Q/S265N/S269P | R219Q/S262N/S266P | 865 | Combination |
| R222Q/S265N/S269Q | R219Q/S262N/S266Q | 866 | Combination |
| R222Q/S265N/S269R | R219Q/S262N/S266R | 867 | Combination |
| R222Q/S265N/S269T | R219Q/S262N/S266T | 868 | Combination |
| R222Q/S265N/S269V | R219Q/S262N/S266V | 869 | Combination |
| R222Q/S265N/S269W | R219Q/S262N/S266W | 870 | Combination |
| R222Q/S265N/S269Y | R219Q/S262N/S266Y | 871 | Combination |
| R222Q/S265N/K270A | R219Q/S262N/K267A | 872 | Combination |
| R222Q/S265N/K270C | R219Q/S262N/K267C | 873 | Combination |
| R222Q/S265N/K270D | R219Q/S262N/K267D | 874 | Combination |
| R222Q/S265N/K270E | R219Q/S262N/K267E | 875 | Combination |
| R222Q/S265N/K270F | R219Q/S262N/K267F | 876 | Combination |
| R222Q/S265N/K270G | R219Q/S262N/K267G | 877 | Combination |
| R222Q/S265N/K270H | R219Q/S262N/K267H | 878 | Combination |
| R222Q/S265N/K270I | R219Q/S262N/K267I | 879 | Combination |
| R222Q/S265N/K270L | R219Q/S262N/K267L | 880 | Combination |
| R222Q/S265N/K270M | R219Q/S262N/K267M | 881 | Combination |
| R222Q/S265N/K270N | R219Q/S262N/K267N | 882 | Combination |
| R222Q/S265N/K270P | R219Q/S262N/K267P | 883 | Combination |
| R222Q/S265N/K270Q | R219Q/S262N/K267Q | 884 | Combination |
| R222Q/S265N/K270R | R219Q/S262N/K267R | 885 | Combination |
| R222Q/S265N/K270S | R219Q/S262N/K267S | 886 | Combination |
| R222Q/S265N/K270T | R219Q/S262N/K267T | 887 | Combination |
| R222Q/S265N/K270V | R219Q/S262N/K267V | 888 | Combination |
| R222Q/S265N/K270W | R219Q/S262N/K267W | 889 | Combination |
| R222Q/S265N/K270Y | R219Q/S262N/K267Y | 890 | Combination |
| R222Q/S265N/V299A | R219Q/S262N/V296A | 891 | Combination |
| R222Q/S265N/V299C | R219Q/S262N/V296C | 892 | Combination |
| R222Q/S265N/V299D | R219Q/S262N/V296D | 893 | Combination |
| R222Q/S265N/V299E | R219Q/S262N/V296E | 894 | Combination |
| R222Q/S265N/V299F | R219Q/S262N/V296F | 895 | Combination |
| R222Q/S265N/V299G | R219Q/S262N/V296G | 896 | Combination |
| R222Q/S265N/V299H | R219Q/S262N/V296H | 897 | Combination |
| R222Q/S265N/V299I | R219Q/S262N/V296I | 898 | Combination |
| R222Q/S265N/V299K | R219Q/S262N/V296K | 899 | Combination |
| R222Q/S265N/V299L | R219Q/S262N/V296L | 900 | Combination |
| R222Q/S265N/V299M | R219Q/S262N/V296M | 901 | Combination |
| R222Q/S265N/V299N | R219Q/S262N/V296N | 902 | Combination |
| R222Q/S265N/V299P | R219Q/S262N/V296P | 903 | Combination |
| R222Q/S265N/V299Q | R219Q/S262N/V296Q | 904 | Combination |
| R222Q/S265N/V299R | R219Q/S262N/V296R | 905 | Combination |
| R222Q/S265N/V299S | R219Q/S262N/V296S | 906 | Combination |
| R222Q/S265N/V299T | R219Q/S262N/V296T | 907 | Combination |
| R222Q/S265N/V299W | R219Q/S262N/V296W | 908 | Combination |
| R222Q/S265N/V299Y | R219Q/S262N/V296Y | 909 | Combination |
| R222Q/K14A/R23A | R219Q/K11A/R20A | 910 | Combination |
| R222Q/K14A/R23A/K374A | R219Q/K11A/R20A/K371A | 911 | Combination |
| R222Q/R23A/K374A | R219Q/R20A/K371A | 912 | Combination |
| R222Q/K14A/K374A | R219Q/K11A/K371A | 913 | Combination |
| S265N/K14A/R23A | S262N/K11A/R20A | 914 | Combination |
| S265N/K14A/R23A/K374A | S262N/K11A/R20A/K371A | 915 | Combination |
| S265N/R23A/K374A | S262N/R20A/K371A | 916 | Combination |
| S265N/K14A/K374A | S262N/K11A/K371A | 917 | Combination |
| R222Q/C108- | R219Q/C105- | 918 | Combination w/ |
| T150del→(Gly)n | T147del→(Gly)n | | PRB deletion |
| R222Q/V102- | R219Q/V99- | 919 | Combination w/ |
| Q147del→(GGGGS)n | Q144del→(GGGGS)n | | PRB deletion |
| R222Q/C108- | R219Q/C105- | 920 | Combination w/ |
| T150del→(GGGGS)n | T147del→(GGGGS)n | | PRB deletion |
| R222Q/N101-N159del | R219Q/N98-N156del | 921 | Combination w/ |
| | | | PRB deletion |
| R222Q/C108-E151del | R219Q/C105-E148del | 922 | Combination w/ |
| | | | PRB deletion |
| R222Q/C108-T150del | R219Q/C105-T147del | 923 | Combination w/ |
| | | | PRB deletion |
| R222Q/V102-Q147del | R219Q/V99-Q144del | 924 | Combination w/ |
| | | | PRB deletion |
| S265N/C108- | S262N/C105- | 925 | Combination w/ |
| T150del→(Gly)n | T147del→(Gly)n | | PRB deletion |
| S265N/V102- | S262N/V99- | 926 | Combination w/ |
| Q147del→(GGGGS)n | Q144del→(GGGGS)n | | PRB deletion |
| S265N/C108- | S262N/C105- | 927 | Combination w/ |
| T150del→(GGGGS)n | T147del→(GGGGS)n | | PRB deletion |
| S265N/N101-N159del | S262N/N98-N156del | 928 | Combination w/ |
| | | | PRB deletion |
| S265N/C108-E151del | S262N/C105-E148del | 929 | Combination w/ |
| | | | PRB deletion |
| S265N/C108-T150del | S262N/C105-T147del | 930 | Combination w/ |
| | | | PRB deletion |
| S265N/V102-Q147del | S262N/V99-Q144del | 931 | Combination w/ |
| | | | PRB deletion |

[1244] Since modifications will be apparent to those of skill in the art, it is intended that this invention be limited only by the scope of the appended claims.

1. A variant adenosine deaminase 2 protein (ADA2) protein or a catalytically active portion thereof, comprising one or more modifications in the sequence of amino acids of an unmodified ADA2 polypeptide or a catalytically active portion thereof,
the unmodified ADA2 protein comprises the sequence of amino acids set forth in SEQ ID NO:5 or a catalytically active portion thereof, or a sequence of amino acids that has at least 95% sequence identity to the sequence of amino acids set forth in SEQ ID NO:5 or a catalytically active portion thereof,
the amino acid modification(s) are selected from among amino acid replacement(s), deletion(s) and insertion(s);
the variant ADA2 protein comprises one or more amino acid replacements at an amino acid position corresponding to amino acid residue 11, 13, 20, 22, 26, 86, 109, 118, 119, 124, 133, 139, 179, 183, 191, 217, 219, 221, 224, 258, 262, 264, 266, 267, 277, 283, 296, 309, 317, 321, 352, 366, 371, 372, 373, 374, 403, 404, 405, 406, 441, 444, 452, 461, 469 or 470, with reference to amino acid positions set forth in SEQ ID NO:5;
the variant ADA2 protein that has at least 85% sequence identity to the sequence of amino acids set forth in SEQ ID NO:5 or to a corresponding catalytically active portion thereof,
the catalytically active portion comprises the PRB domain or a deletion of all or a portion of the PRB domain, and optionally comprises a linker in place of all or a portion of PRB domain;
the variant ADA2 protein, when in dimer form, exhibits one or more properties selected from among increased adenosine deaminase activity, reduced heparin binding, longer serum half-life, altered pH optimum, increased thermal stability, altered receptor binding, and hyperglycosylation compared to the corresponding dimer form of the unmodified ADA2 protein of SEQ ID NO:5 or dimer form of the corresponding catalytically activity portion thereof; and
the variant ADA2 protein or catalytically active portion thereof, when in dimer form, exhibits adenosine deaminase activity to convert adenosine to inosine.

2. The variant ADA2 protein or catalytically active portion thereof of claim 1, wherein:
the variant ADA2 protein or catalytically active portion thereof has at least 95% sequence identity with the unmodified ADA2 protein of any of SEQ ID NOs: 326-330, and 380-383 or with a catalytically active portion of ADA2 protein of any of SEQ ID NOs: 326-330, and 380-383; and
the catalytically active portion includes all of the PRB, or deletion of all or a portion of the PRB.

3. The variant ADA2 protein or catalytically active portion thereof of claim 1, wherein the variant ADA2 protein or catalytically active portion thereof has at least 95% sequence identity with the unmodified ADA2 protein of SEQ ID NO: 5.

4. The variant ADA2 protein or catalytically active portion thereof of claim 1, wherein the variant ADA2 protein or catalytically active portion thereof exhibits altered heparin binding.

5. The variant ADA2 protein or catalytically active portion thereof of claim 4, wherein the variant ADA2 protein or catalytically active portion thereof comprises a replacement at one or more of residues 11, 13, 20, 26, 217, 258, 277, 283, 309, 317, 321, 352, 366, 371, 372, 441, 444, 452, 461, 469 and 470, with reference to amino acid positions set forth in SEQ ID NO:5.

6. The variant ADA2 protein or catalytically active portion thereof of claim 5, wherein the amino acid replacement is selected from among one or more of K11A, K11D, K11E, K13A, K13D, K13E, K371A, K371D, K371E, K372A, K372D, K372E, K452A, K452D, K452E, R20A, R20D, R20E, R366A, R366D, R366E, K11A/R20A, K11A/R20A/K371A, R20A/K371A, and K11A/K371A, with reference to amino acid positions set forth in SEQ ID NO:5.

7. The variant ADA2 protein or catalytically active portion thereof of claim 6, wherein the amino acid replacement is selected from among one or more of R20E, K371D, K371E, K372D, K372E, K452D, K452E, and R366E, with reference to amino acid positions set forth in SEQ ID NO:5.

8. The variant ADA2 protein or catalytically active portion thereof of claim 1, wherein the variant ADA2 protein or catalytically active portion thereof exhibits altered catalytic efficiency (k_{cat}/Kₘ) for adenosine or altered adenosine deaminase activity.

9. The variant ADA2 protein or catalytically active portion thereof of claim 8, wherein the variant ADA2 protein or catalytically active portion thereof comprises a replacement at one or more of residues 86, 179, 219, 221, 262, 264, 266, 267, and 296, with reference to amino acid positions set forth in SEQ ID NO:5.

10. The variant ADA2 protein or catalytically active portion thereof of claim 9, wherein the amino acid replacement is selected from among one or more of H264A; H264Q; H264N; H264G; R219K; R219Q; R219N; R219A; L221A; L221V; L221G; E179D; E179A; E179S; E179T; E179V; E179G; S262A; S262V; S262M; S262N; D86A; D86C; D86E; D86F; D86G; D86H; D86I; D86K; D86L; D86M; D86N; D86P; D86Q; D86R; D86S; D86T; D86V; D86W; D86Y; E179C; E179F; E179H; E179I; E179K; E179L; E179M; E179N; E179P; E179Q; E179R; E179W; E179Y; R219C; R219D; R219E; R219F; R219G; R219H; R219I; R219L; R219M; R219P; R219S; R219T; R219V; R219W; R219Y; L221C; L221D; L221E; L221F; L221H; L221I; L221K; L221M; L221N; L221P; L221Q; L221R; L221S; L221T; L221W; L221Y; S262C; S262D; S262E; S262F; S262G; S262H; S262I; S262K; S262L; S262P; S262Q; S262R; S262T; S262W; S262Y; H264C; H264D; H264E; H264F; H264I; H264K; H264L; H264M; H264P; H264R; H264S; H264T; H264V; H264W; H264Y; S266A; S266C; S266D; S266E; S266F; S266G; S266H; S266I; S266K; S266L; S266M; S266N; S266P; S266Q; S266R; S266T; S266V; S266W; S266Y; K267A; K267C; K267D; K267E; K267F; K267G; K267H; K267I; K267L; K267M; K267N; K267P; K267Q; K267R; K267S; K267T; K267V; K267W; K267Y; V296A; V296C; V296D; V296E; V296F; V296G; V296H; V296I; V296K; V296L; V296M; V296N; V296P; V296Q; V296R; V296S; V296T; V296W; and V296Y, with reference to amino acid positions set forth in SEQ ID NO:5.

11. The variant ADA2 protein or catalytically active portion thereof of claim 9, wherein the amino acid replacement is selected from among one or more of H264Q, H264G, R219K, R219Q, R219N, L221A, L221V, L221G, S262M, and S262N, with reference to amino acid positions set forth in SEQ ID NO:5.

12. The variant ADA2 protein or catalytically active portion thereof of claim 1, wherein the variant ADA2 protein or catalytically active portion thereof has reduced binding to a receptor.

13. The variant ADA2 protein or catalytically active portion thereof of claim 12, wherein the variant ADA2 protein or catalytically active portion thereof comprises a replacement or deletion in the putative receptor binding (PRB) domain.

14. The variant ADA2 protein or catalytically active portion thereof of claim 13, wherein the variant ADA2 protein or catalytically active portion thereof comprises a replacement at one or more of residues 109, 118, 119, 124, 133, 139, 183, 191, and 224, with reference to amino acid positions set forth in SEQ ID NO:5.

15. The variant ADA2 protein or catalytically active portion thereof of claim 14, wherein the variant ADA2 protein or catalytically active portion thereof comprises a replacement selected from one or more of F109S, F109A, R118D, R118A, F119S, F119K, P124A, P124S, W133S, W133T, Y139A, Y139T, F183K, Y191S, Y191D, Y191D/Y224R, Y224R, and Y224N, with reference to amino acid positions set forth in SEQ ID NO:5.

16. The variant ADA2 protein or catalytically active portion thereof of claim 13, wherein the variant ADA2 protein or catalytically active portion thereof comprises a deletion of residues V99-Q144, or C105-T147, or N98-N156, or C105-E148, with reference to amino acid positions set forth in SEQ ID NO:5, or a portion thereof that eliminates binding to a receptor.

17. The variant ADA2 protein or catalytically active portion thereof of claim 16, wherein the variant ADA2 protein or catalytically active portion thereof includes a linker comprising at least 4 amino acid residues in place of deleted residues.

18. The variant ADA2 protein or catalytically active portion thereof of claim 17, wherein the linker comprises Gly and Ser residues or Gly residues.

19. The variant ADA2 protein or catalytically active portion thereof of claim 17, wherein the linker is:
(GGGGS)ₙ, and n is 1-5; or
(Gly)n, where n=2 to 20.

20. The variant ADA2 protein or catalytically active portion thereof of claim 19, wherein the variant ADA2 protein or catalytically active portion thereof comprises a replacement, deletion, and/or insertion selected from among K371D/V99-Q144del→(GGGGS)₁, K371D/V99-Q144del→(GGGGS)₂, K371D/V99-Q144del→(GGGGS)₃, K371D/C105-T147del→(GGGGS)₁, K371D/C105-T147del→(GGGGS)₂, K371D/C105-T147del→(GGGGS)₃, C105-T147del→(G)n, where n is 1-15, N98-N156del, C105-E148del, and C105-T147del, with reference to amino acid positions set forth in SEQ ID NO:5.

21. The variant ADA2 protein or catalytically active portion thereof of claim 1, wherein the variant ADA2 protein or catalytically active portion thereof comprises replacements that add one or more non-native glycosylation sites.

22. The variant ADA2 protein or catalytically active portion thereof of claim 21, wherein the variant ADA2 protein or catalytically active portion thereof is hyperglycosylated and comprises the replacements selected from among R125N/P126A, S127N/K129S, P126N/E128T, R112N/1114T, 1134N/L135C/L136T, I134N/L135S/L136T, R142N/Q144S, P111N/G113S, and E137N/Y₁₃₉T, with reference to amino acid positions set forth in SEQ ID NO:5.

23. The variant ADA2 protein or catalytically active portion thereof of claim 1, wherein the variant ADA2 protein or catalytically active portion thereof comprises one or more of a replacement, deletion, and insertion in two or more of: the putative receptor binding (PRB) domain to reduce binding to a receptor; the heparin binding domain to decrease heparin binding; and the active site to increase catalytic activity in an active dimer form of the variant ADA2 protein, compared to a dimer of the unmodified ADA2 protein.

24. The variant ADA2 protein or catalytically active portion thereof of claim 1, wherein the variant ADA2 protein or catalytically active portion thereof is PEGylated.

25. The variant ADA2 protein or catalytically active portion thereof of claim 1, wherein:
the variant ADA2 is a multimer, comprising a plurality of variant ADA2 proteins or catalytically active portions thereof, and
the variant ADA2 protein or catalytically active portion thereof are the same or different.

26. The variant ADA2 protein or catalytically active portion thereof of claim 25, wherein the variant ADA2 is a dimer, comprising a variant ADA2 protein or catalytically active portion thereof.

27. The variant ADA2 protein or catalytically active portion thereof of claim 26, wherein the variant ADA2 dimer or catalytically active portion thereof is a homodimer comprising two variant ADA2 proteins or catalytically active portions thereof that are the same.

28. The variant ADA2 protein or catalytically active portion thereof of claim 26, wherein the variant ADA2 dimer or catalytically active portion thereof is a heterodimer comprising two variant ADA2 proteins or catalytically active portions thereof that are different from each other.

29. The variant ADA2 protein or catalytically active portion thereof of claim 1, wherein the variant ADA2 protein or catalytically active portion, is linked by chemical or physical interaction directly or indirectly via a linker to a half-life extending moiety.

30. The variant ADA2 protein or catalytically active portion thereof of claim 29, wherein:
the half-life extending moiety is a PEG; and
the ADA2 protein or catalytically active portion thereof is PEGylated.

31. The variant ADA2 protein or catalytically active portion thereof of claim 1, wherein the ADA2 protein is PEGylated.

32. The variant ADA2 protein or catalytically active portion thereof of claim 1, wherein the ADA2 protein comprises an ADA2 dimer.

33. The variant ADA2 protein or catalytically active portion thereof of claim 32, wherein the dimer is a homodimer.

34. The variant ADA2 protein or catalytically active portion thereof of claim 33, wherein the dimer is PEGylated.

35. The variant ADA2 protein or catalytically active portion thereof of claim 1, wherein the ADA2 protein is modified by deletion of all or part of the putative receptor binding (PRB), whereby the ADA2 protein and dimer thereof do not bind to a growth factor receptor.

36. The variant ADA2 protein or catalytically active portion thereof of claim 1, wherein the ADA2 protein is modified, whereby heparin binding is reduced and catalytic activity is increased.

37. The variant ADA2 protein or catalytically active portion thereof of claim 35, wherein the ADA2 protein is modified, whereby heparin binding is reduced and catalytic activity is increased.

38. The variant ADA2 protein or catalytically active portion thereof of claim 1, wherein the unmodified ADA2 protein comprises the sequence of amino acids set forth in any of SEQ ID NOs: 5, 326-330, and 380-383 or is a catalytically active portion thereof, wherein the catalytically active portion comprises the PRB domain or a deletion of all or a portion of the PRB domain.

39. The variant ADA2 protein or catalytically active portion thereof of claim 1, wherein:
replacements that confer increased adenosine deaminase activity are selected from among K11E, R20E, R219K, R219Q, R219N, L221A, L221V, L221G, S262M, S262N, H264Q, H264G, R366D, R366E, K371D, K371E, K372A, K372D, K372E, K452D, K452E, K11A/R20A, and R20A/K371A, with reference to amino acid positions set forth in SEQ ID NO:5;
replacements that confer longer serum half-life are selected from among R20E and K371D, with reference to amino acid positions set forth in SEQ ID NO:5;
replacements that confer altered pH optimum are selected from among R20E, R219Q, S262N, K371D, K371E, R219Q/S262N, S262N/K371D, S262N/K371E, R20E/R219Q, R20E/S262N, R20E/S262N/K371D, R20E/S262N/K371E, R219Q/K371D, R219Q/K371E, R20E/R219Q/K371E, R20E/R219Q/K371D, R219Q/S262N/K371E, R219Q/S262N/K371D, R20E/R219Q/S262N, R20E/R219Q/S262N/K371E, and R20E/R219Q/S262N/K371D, with reference to amino acid positions set forth in SEQ ID NO:5;
the replacement that confers increased thermal stability is K371E, with reference to amino acid positions set forth in SEQ ID NO:5;
replacements that confer altered receptor binding are selected from among F119S, F119K, Y224R, Y224N, Y191S, Y191D, F183K, Y191D/Y224R, F109S, F109A, R118D, R118A, Y139T, Y139A, W133S, W133T, P124A, and P124S, with reference to amino acid positions set forth in SEQ ID NO:5; and
amino acid modifications that result in one or more additional glycosylation sites are selected from among --→N1/--→A2/--→S3, R20N/V22S, K371N/D373S, K372N/I374S, T403N/H405S, G404N/P406S, R125N/P126A, S127N/K129S, P126N/E128T, R112N/I114T, I134N/L135C/L136T, I134N/L135S/L, 136T, R142N/Q144S, E137N/Y139T, and P111N/G113 S, with reference to amino acid positions set forth in SEQ ID NO:5.

40. The variant ADA2 protein or catalytically active portion thereof of claim 39 that lacks all or a portion of the PRB domain.

41. A variant ADA2 protein or catalytically active portion thereof of claim 1, wherein:
the unmodified ADA2 protein is selected from among an ADA2 protein that comprises the sequence of amino acids set forth in any one of SEQ ID NOs: 326-330, and 380-383, or is a catalytically active portion thereof that contains the ADA domain, and optionally, lacks all or a portion of the PRB domain, and optionally contains a linker in place thereof,
the PRB domain consists of all or a portion of the residues corresponding to residues 98-156 of SEQ ID NO:5;
the ADA domain corresponds to residues 77-473 of the mature protein set forth in SEQ ID NO:5.

42. The variant ADA2 protein or catalytically active portion thereof of claim 1, wherein:
the ADA protein, or variant ADA2 protein, or catalytically active portion thereof comprises a deletion of all or a portion of the PRB domain; and
the PRB domain consists of residues corresponding to residues 98-156 of SEQ ID NO:5.

43. The variant ADA2 protein or catalytically active portion thereof of claim 42, wherein the ADA2 protein, variant ADA2 protein, or catalytically active portion thereof comprises a linker in place of the deleted PRB domain or in place of a portion of the deleted PRB domain.

44. The variant ADA2 protein or catalytically active portion thereof of claim 43, wherein the linker is (GGGGS)ₙ, and n is 1-5; or is (Gly)n, where n=2 to 20.

45. The variant ADA2 protein or catalytically active portion thereof of claim 1, wherein:
the ADA2 protein, variant ADA2 protein, or catalytically active portion comprises the catalytic domain of the ADA2;
the catalytic domain consists of residues corresponding to residues 77-473 of the sequence of amino acids set forth in SEQ ID NO:5;
the ADA2 protein, variant ADA2 protein, or catalytically active portion comprises a deletion of all or a portion of the PRB domain; and
the PRB domain consists of residues corresponding to residues 98-156 of SEQ ID NO:5.

46. The variant ADA2 protein or catalytically active portion thereof of claim 1, wherein the ADA2 protein, variant ADA2 protein, or catalytically active form thereof comprises a linker in place of all or a portion of the deleted PRB domain or the deleted portion thereof.

47. The variant ADA2 protein or catalytically active portion thereof of claim 46, wherein the linker is (GGGGS)ₙ, and n is 1-5; or is (Gly)n, where n=2 to 20.

The application's sequence listing, which the Patent Office published only in electronic form, follows.

SEQUENCE LISTING (931 sequences)

SEQ ID NO: 1 - DNA, 1533 bp, Homo sapiens
  misc_feature 1..1533: note = Adenosine deaminase 2 precursor
  source 1..1533: mol_type = genomic DNA
atgttggtggatggcccatctgagcggccagccctgtgcttcttgctgttggctgtggcaatgtctttcttcggctcagctctatccatagatgaaacacgggcgcatctgttgttgaaagaaaagatgatgcggctcggggggcggctggtgctgaacaccaaggaggagctggccaatgagaggctcatgacgctcaaaatcgctgagatgaaggaggccatgaggaccctgatattcccacccagcatgcactttttccaggccaagcatctcattgagagaagtcaagtgtttaatattctaaggatgatgccaaaaggggctgccttgcacctccatgacattggcatcgtgactatggactggctggtgaggaatgtcacctacaggcctcactgccacatctgtttcaccccaagggggatcatgcagttcagatttgctcacccaactccccgtccatcagaaaaatgttccaagtggattctgctggaggattatcggaagcgggtgcagaacgtcactgagtttgatgacagcttgctgaggaatttcactctggtgacccagcacccggaggtgatttacacaaaccaaaatgttgtctggtcgaaatttgaaaccatcttcttcaccatctctggtctcatccattacgcaccagtgttcagagactatgtcttccggagcatgcaggagttctacgaggacaacgtgctctacatggagatcagagccaggctgctgccggtgtatgagctcagtggagagcaccatgacgaagagtggtcagtgaagacttaccaggaagtagctcagaagtttgtggaaactcaccctgagtttattggaatcaaaatcatttattcggatcacagatccaaagatgtggctgtcatcgcagaatccatccgaatggccatggggctccgaatcaagttccccacggtggtggcagggtttgacctggtggggcatgaggacactggccactccttgcatgactacaaggaagctctgatgatccccgccaaggatggcgttaagctgccttacttcttccacgccggagaaacagactggcagggtacttccatagacaggaacattctggatgctctgatgctgaacactaccagaatcggccatggatttgctttgagcaaacaccccgcagtcaggacttactcctggaaaaaggacatccccatagaagtctgtcccatctctaaccaggtgctgaaactggtgtctgacttgaggaaccaccctgtagccactctgatggccactgggcaccccatggtgatcagctctgatgacccagctatgtttggtgccaaaggcttgtcctacgatttctatgaggtcttcatgggcattggggggatgaaggctgacctgaggaccctcaaacagctggccatgaactctatcaagtacagtaccctgttggagagtgagaaaaatactttcatggaaatctggaagaagagatgggataagttcatagcagatgtggctacaaag

SEQ ID NO: 2 - protein, 511 aa, Homo sapiens
  REGION 1..511: note = Adenosine deaminase 2 precursor
  SIGNAL 1..29
MLVDGPSERPALCFLLLAVAMSFFGSALSIDETRAHLLLKEKMMRLGGRLVLNTKEELANERLMTLKIAEMKEAMRTLIFPPSMHFFQAKHLIERSQVFNILRMMPKGAALHLHDIGIVTMDWLVRNVTYRPHCHICFTPRGIMQFRFAHPTPRPSEKCSKWILLEDYRKRVQNVTEFDDSLLRNFTLVTQHPEVIYTNQNVVWSKFETIFFTISGLIHYAPVFRDYVFRSMQEFYEDNVLYMEIRARLLPVYELSGEHHDEEWSVKTYQEVAQKFVETHPEFIGIKIIYSDHRSKDVAVIAESIRMAMGLRIKFPTVVAGFDLVGHEDTGHSLHDYKEALMIPAKDGVKLPYFFHAGETDWQGTSIDRNILDALMLNTTRIGHGFALSKHPAVRTYSWKKDIPIEVCPISNQVLKLVSDLRNHPVATLMATGHPMVISSDDPAMFGAKGLSYDFYEVFMGIGGMKADLRTLKQLAMNSIKYSTLLESEKNTFMEIWKKRWDKFIADVATK

SEQ ID NO: 3 - protein, 376 aa, synthetic construct
  REGION 1..376: note = ADA1-linker-Strep
MAQTPAFDKPKVELHVHLDGSIKPETILYYGRRRGIALPANTAEGLLNVIGMDKPLTLPDFLAKFDYYMPAIAGCREAIKRIAYEFVEMKAKEGVVYVEVRYSPHLLANSKVEPIPWNQAEGDLTPDEVVALVGQGLQEGERDFGVKARSILCCMRHQPNWSPKVVELCKKYQQQTVVAIDLAGDETIPGSSLLPGHVQAYQEAVKSGIHRTVHAGEVGSAEVVKEAVDILKTERLGHGYHTLEDQALYNRLRQENMHFEICPWSSYLTGAWKPDTEHAVIRLKNDQANYSLNTDDPLIFKSTLDTDYQMTKRDMGFTEEEFKRLNINAAKSSFLPEDEKRELLDLLYKAYGMPPSASAGQNLSGSGSWSHPQFEK

SEQ ID NO: 4 - protein, 508 aa, synthetic construct
  REGION 1..508: note = ADA2 crystal structure sequence
GGSIDETRAHLLLKEKMMRLGGRLVLNTKEELANERLMTLKIAEMKEAMRTLIFPPSMHFFQAKHLIERSQVFNILRMMPKGAALHLHDIGIVTMDWLVRNVTYRPHCHICFTPRGIMQFRFAHPTPRPSEKCSKWILLEDYRKRVQNVTEFDDSLLRNFTLVTQHPEVIYTNQNVVWSKFETIFFTISGLIHYAPVFRDYVFRSMQEFYEDNVLYMEIRARLLPVYELSGEHHDEEWSVKTYQEVAQKFVETHPEFIGIKIIYSDHRSKDVAVIAESIRMAMGLRIKFPTVVAGFDLVGHEDTGHSLHDYKEALMIPAKDGVKLPYFFHAGETDWQGTSIDRNILDALMLNTTRIGHGFALSKHPAVRTYSWKKDIPIEVCPISNQVLKLVSDLRNHPVATLMATGHPMVISSDDPAMFGAKGLSYDFYEVFMGIGGMKADLRTLKQLAMNSIKYSTLLESEKNTFMEIWKKRWDKFIADVATKGSLHHILDAQKMVWNHRHHHHHH

SEQ ID NO: 5 - protein, 482 aa, Homo sapiens
  REGION 1..482: note = ADA2 mature protein
IDETRAHLLLKEKMMRLGGRLVLNTKEELANERLMTLKIAEMKEAMRTLIFPPSMHFFQAKHLIERSQVFNILRMMPKGAALHLHDIGIVTMDWLVRNVTYRPHCHICFTPRGIMQFRFAHPTPRPSEKCSKWILLEDYRKRVQNVTEFDDSLLRNFTLVTQHPEVIYTNQNVVWSKFETIFFTISGLIHYAPVFRDYVFRSMQEFYEDNVLYMEIRARLLPVYELSGEHHDEEWSVKTYQEVAQKFVETHPEFIGIKIIYSDHRSKDVAVIAESIRMAMGLRIKFPTVVAGFDLVGHEDTGHSLHDYKEALMIPAKDGVKLPYFFHAGETDWQGTSIDRNILDALMLNTTRIGHGFALSKHPAVRTYSWKKDIPIEVCPISNQVLKLVSDLRNHPVATLMATGHPMVISSDDPAMFGAKGLSYDFYEVFMGIGGMKADLRTLKQLAMNSIKYSTLLESEKNTFMEIWKKRWDKFIADVATK

SEQ ID NO: 6 - DNA, 4278 bp, synthetic construct
  misc_feature 1..4278: note = pCMV-Script
  source 1..4278: mol_type = other DNA
atgcattagttattaatagtaatcaattacggggtcattagttcatagcccatatatggagttccgcgttacataacttacggtaaatggcccgcctggctgaccgcccaacgacccccgcccattgacgtcaataatgacgtatgttcccatagtaacgccaatagggactttccattgacgtcaatgggtggagtatttacggtaaactgcccacttggcagtacatcaagtgtatcatatgccaagtacgccccctattgacgtcaatgacggtaaatggcccgcctggcattatgcccagtacatgaccttatgggactttcctacttggcagtacatctacgtattagtcatcgctattaccatggtgatgcggttttggcagtacatcaatgggcgtggatagcggtttgactcacggggatttccaagtctccaccccattgacgtcaatgggagtttgttttggcaccaaaatcaacgggactttccaaaatgtcgtaacaactccgccccattgacgcaaatgggcggtaggcgtgtacggtgggaggtctatataagcagagctggtttagtgaaccgtcagatccgctagcgattacgccaagctcgaaattaaccctcactaaagggaacaaaagctggagctccaccgcggtggcggccgctctagcccgggcggatcccccgggctgcaggaattcgatatcaagcttatcgataccgtcgacctcgagggggggcccggtaccaggtaagtgtacccaattcgccctatagtgagtcgtattacaattcactcgatcgcccttcccaacagttgcgcagcctgaatggcgaatggagatccaatttttaagtgtataatgtgttaaactactgattctaattgtttgtgtattttagattcacagtcccaaggctcatttcaggcccctcagtcctcacagtctgttcatgatcataatcagccataccacatttgtagaggttttacttgctttaaaaaacctcccacacctccccctgaacctgaaacataaaatgaatgcaattgttgttgttaacttgtttattgcagcttataatggttacaaataaagcaatagcatcacaaatttcacaaataaagcatttttttcactgcattctagttgtggtttgtccaaactcatcaatgtatcttaacgcgtaaattgtaagcgttaatattttgttaaaattcgcgttaaatttttgttaaatcagctcattttttaaccaataggccgaaatcggcaaaatcccttataaatcaaaagaatagaccgagatagggttgagtgttgttccagtttggaacaagagtccactattaaagaacgtggactccaacgtcaaagggcgaaaaaccgtctatcagggcgatggcccactacgtgaaccatcaccctaatcaagttttttggggtcgaggtgccgtaaagcactaaatcggaaccctaaagggagcccccgatttagagcttgacggggaaagccggcgaacgtggcgagaaaggaagggaagaaagcgaaaggagcgggcgctagggcgctggcaagtgtagcggtcacgctgcgcgtaaccaccacacccgccgcgcttaatgcgccgctacagggcgcgtcaggtggcacttttcggggaaatgtgcgcggaacccctatttgtttatttttctaaatacattcaaatatgtatccgctcatgagacaataaccctgataaatgcttcaataatattgaaaaaggaagaatcctgaggcggaaagaaccagctgtggaatgtgtgtcagttagggtgtggaaagtccccaggctccccagcaggcagaagtatgcaaagcatgcatctcaattagtcagcaaccaggtgtggaaagtccccaggctccccagcaggcagaagtatgcaaagcatgcatctcaattagtcagcaaccatagtcccgcccctaactccgcccatcccgcccctaactccgcccagttccgcccattctccgccccatggctgactaattttttttatttatgcagaggccgaggccgcctcggcctctgagctattccagaagtagtgaggaggcttttttggaggcctaggcttttgcaaagatcgatcaagagacaggatgaggatcgtttcgcatgattgaacaagatggattgcacgcaggttctccggccgcttgggtggagaggctattcggctatgactgggcacaacagacaatcggctgctctgatgccgccgtgttccggctgtcagcgcaggggcgcccggttctttttgtcaagaccgacctgtccggtgccctgaatgaactgcaagacgaggcagcgcggctatcgtggctggccacgacgggcgttccttgcgcagctgtgctcgacgttgtcactgaagcgggaagggactggctgctattgggcgaagtgccggggcaggatctcctgtcatctcaccttgctcctgccgagaaagtatccatcatggctgatgcaatgcggcggctgcatacgcttgatccggctacctgcccattcgaccaccaagcgaaacatcgcatcgagcgagcacgtactcggatggaagccggtcttgtcgatcaggatgatctggacgaagaacatcaggggctcgcgccagccgaactgttcgccaggctcaaggcgagcatgcccgacggcgaggatctcgtcgtgacccatggcgatgcctgcttgccgaatatcatggtggaaaatggccgcttttctggattcatcgactgtggccggctgggtgtggcggaccgctatcaggacatagcgttggctacccgtgatattgctgaagaacttggcggcgaatgggctgaccgcttcctcgtgctttacggtatcgccgctcccgattcgcagcgcatcgccttctatcgccttcttgacgagttcttctgagcgggactctggggttcgaaatgaccgaccaagcgacgcccaacctgccatcacgagatttcgattccaccgccgccttctatgaaaggttgggcttcggaatcgttttccgggacgccggctggatgatcctccagcgcggggatctcatgctggagttcttcgcccaccctagggggaggctaactgaaacacggaaggagacaataccggaaggaacccgcgctatgacggcaataaaaagacagaataaaacgcacggtgttgggtcgtttgttcataaacgcggggttcggtcccagggctggcactctgtcgataccccaccgagaccccattggggccaatacgcccgcgtttcttccttttccccaccccaccccccaagttcgggtgaaggcccagggctcgcagccaacgtcggggcggcaggccctgccatagcctcaggttactcatatatactttagattgatttaaaacttcatttttaatttaaaaggatctaggtgaagatcctttttgataatctcatgaccaaaatcccttaacgtgagttttcgttccactgagcgtcagaccccgtagaaaagatcaaaggatcttcttgagatcctttttttctgcgcgtaatctgctgcttgcaaacaaaaaaaccaccgctaccagcggtggtttgtttgccggatcaagagctaccaactctttttccgaaggtaactggcttcagcagagcgcagataccaaatactgtccttctagtgtagccgtagttaggccaccacttcaagaactctgtagcaccgcctacatacctcgctctgctaatcctgttaccagtggctgctgccagtggcgataagtcgtgtcttaccgggttggactcaagacgatagttaccggataaggcgcagcggtcgggctgaacggggggttcgtgcacacagcccagcttggagcgaacgacctacaccgaactgagatacctacagcgtgagctatgagaaagcgccacgcttcccgaagggagaaaggcggacaggtatccggtaagcggcagggtcggaacaggagagcgcacgagggagcttccagggggaaacgcctggtatctttatagtcctgtcgggtttcgccacctctgacttgagcgtcgatttttgtgatgctcgtcaggggggcggagcctatggaaaaacgccagcaacgcggcctttttacggttcctggccttttgctggccttttgctcacatgttctttcctgcgttatcccctgattctgtggataaccgtattaccgcc

SEQ ID NO: 7 - protein, 490 aa, synthetic construct
  REGION 1..490: note = ADA2-FLAG
  PEPTIDE 483..490: note = FLAG tag
IDETRAHLLLKEKMMRLGGRLVLNTKEELANERLMTLKIAEMKEAMRTLIFPPSMHFFQAKHLIERSQVFNILRMMPKGAALHLHDIGIVTMDWLVRNVTYRPHCHICFTPRGIMQFRFAHPTPRPSEKCSKWILLEDYRKRVQNVTEFDDSLLRNFTLVTQHPEVIYTNQNVVWSKFETIFFTISGLIHYAPVFRDYVFRSMQEFYEDNVLYMEIRARLLPVYELSGEHHDEEWSVKTYQEVAQKFVETHPEFIGIKIIYSDHRSKDVAVIAESIRMAMGLRIKFPTVVAGFDLVGHEDTGHSLHDYKEALMIPAKDGVKLPYFFHAGETDWQGTSIDRNILDALMLNTTRIGHGFALSKHPAVRTYSWKKDIPIEVCPISNQVLKLVSDLRNHPVATLMATGHPMVISSDDPAMFGAKGLSYDFYEVFMGIGGMKADLRTLKQLAMNSIKYSTLLESEKNTFMEIWKKRWDKFIADVATKDYKDDDDK

SEQ ID NO: 8 - DNA, 24 bp, synthetic construct
  misc_feature 1..24: note = FLAG DNA
  source 1..24: mol_type = other DNA
gattacaaggatgacgacgataag

SEQ ID NO: 9 - protein, 8 aa, synthetic construct
  REGION 1..8: note = FLAG tag
DYKDDDDK

SEQ ID NO: 10 - DNA, 10837 bp, synthetic construct
  misc_feature 1..10837: note = pLV-EF1a-hADA2-Flag-IRES-GFP-Bsd plasmid
  source 1..10837: mol_type = other DNA
aagcttaatgtagtcttatgcaatactcttgtagtcttgcaacatggtaacgatgagttagcaacatgccttacaaggagagaaaaagcaccgtgcatgccgattggtggaagtaaggtggtacgatcgtgccttattaggaaggcaacagacgggtctgacatggattggacgaaccactgaattgccgcattgcagagatattgtatttaagtgcctagctcgatacataaacgggtctctctggttagaccagatctgagcctgggagctctctggctaactagggaacccactgcttaagcctcaataaagcttgccttgagtgcttcaagtagtgtgtgcccgtctgttgtgtgactctggtaactagagatccctcagacccttttagtcagtgtggaaaatctctagcagtggcgcccgaacagggacttgaaagcgaaagggaaaccagaggagctctctcgacgcaggactcggcttgctgaagcgcgcacggcaagaggcgaggggcggcgactggtgagtacgccaaaaattttgactagcggaggctagaaggagagagatgggtgcgagagcgtcagtattaagcgggggagaattagatcgcgatgggaaaaaattcggttaaggccagggggaaagaaaaaatataaattaaaacatatagtatgggcaagcagggagctagaacgattcgcagttaatcctggcctgttagaaacatcagaaggctgtagacaaatactgggacagctacaaccatcccttcagacaggatcagaagaacttagatcattatataatacagtagcaaccctctattgtgtgcatcaaaggatagagataaaagacaccaaggaagctttagacaagatagaggaagagcaaaacaaaagtaagaccaccgcacagcaagcggccgctgatcttcagacctggaggaggagatatgagggacaattggagaagtgaattatataaatataaagtagtaaaaattgaaccattaggagtagcacccaccaaggcaaagagaagagtggtgcagagagaaaaaagagcagtgggaataggagctttgttccttgggttcttgggagcagcaggaagcactatgggcgcagcgtcaatgacgctgacggtacaggccagacaattattgtctggtatagtgcagcagcagaacaatttgctgagggctattgaggcgcaacagcatctgttgcaactcacagtctggggcatcaagcagctccaggcaagaatcctggctgtggaaagatacctaaaggatcaacagctcctggggatttggggttgctctggaaaactcatttgcaccactgctgtgccttggaatgctagttggagtaataaatctctggaacagatttggaatcacacgacctggatggagtgggacagagaaattaacaattacacaagcttaatacactccttaattgaagaatcgcaaaaccagcaagaaaagaatgaacaagaattattggaattagataaatgggcaagtttgtggaattggtttaacataacaaattggctgtggtatataaaattattcataatgatagtaggaggcttggtaggtttaagaatagtttttgctgtactttctatagtgaatagagttaggcagggatattcaccattatcgtttcagacccacctcccaaccccgaggggacccgacaggcccgaaggaatagaagaagaaggtggagagagagacagagacagatccattcgattagtgaacggatctcgacggtatcggttaacttttaaaagaaaaggggggattggggggtacagtgcaggggaaagaatagtagacataatagcaacagacatacaaactaaagaattacaaaaacaaattacaaaattcaaaattttatcgatgcctccccgtcaccaccccccccaacccgccccgaccggagctgagagtaattcatacaaaaggactcgcccctgccttggggaatcccagggaccgtcgttaaactcccactaacgtagaacccagagatcgctgcgttcccgccccctcacccgcccgctctcgtcatcactgaggtggagaagagcatgcgtgaggctccggtgcccgtcagtgggcagagcgcacatcgcccacagtccccgagaagttggggggaggggtcggcaattgaaccggtgcctagagaaggtggcgcggggtaaactgggaaagtgatgtcgtgtactggctccgcctttttcccgagggtgggggagaaccgtatataagtgcagtagtcgccgtgaacgttctttttcgcaacgggtttgccgccagaacacaggtaagtgccgtgtgtggttcccgcgggcctggcctctttacgggttatggcccttgcgtgccttgaattacttccacgcccctggctgcagtacgtgattcttgatcccgagcttcgggttggaagtgggtgggagagttcgaggccttgcgcttaaggagccccttcgcctcgtgcttgagttgaggcctggcctgggcgctggggccgccgcgtgcgaatctggtggcaccttcgcgcctgtctcgctgctttcgataagtctctagccatttaaaatttttgatgatatcctgcgacgctttttttctggcaagatagtcttgtaaatgcgggccaagatctgcacactggtatttcggtttttggggccgcgggcggcgacggggcccgtgcgtcccagcgcacatgttcggcgaggcggggcctgcgagcgcggccaccgagaatcggacgggggtagtctcaagctggccggcctgctctggtgcctggcctcgcgccgccgtgtatcgccccgccctgggcggcaaggctggcccggtcggcaccagttgcgtgagcggaaagatggccgcttcccggccctgctgcagggagctcaaaatggaggacgcggcgctcgggagagcgggcgggtgagtcacccacacaaaggaaaagggcctttccgtcctcagccgtcgcttcatgtgactccacggagtaccgggcgccgtccaggcacctcgattagttctcgagcttttggagtacgtcgtctttaggttggggggaggggttttatgcgatggagtttccccacactgagtgggtggagactgaagttaggccagcttggcacttgatgtaattctccttggaatttgccctttttgagtttggatcttggttcattctcaagcctcagacagtggttcaaagtttttttcttccatttcaggtgtcgtgaaaactacccctctagataatacgactcactatagggcccgggttggatccgccaccatgttggtggatggcccatctgagcggccagccctgtgcttcttgctgttggctgtggcaatgtctttcttcggctcagctctatccatagatgaaacacgggcgcatctgttgttgaaagaaaagatgatgcggctcggggggcggctggtgctgaacaccaaggaggagctggccaatgagaggctcatgacgctcaaaatcgctgagatgaaggaggccatgaggaccctgatattcccacccagcatgcactttttccaggccaagcatctcattgagagaagtcaagtgtttaatattctaaggatgatgccaaaaggggctgccttgcacctccatgacattggcatcgtgactatggactggctggtgaggaatgtcacctacaggcctcactgccacatctgtttcaccccaagggggatcatgcagttcagatttgctcacccaactccccgtccatcagaaaaatgttccaagtggattctgctggaggattatcggaagcgggtgcagaacgtcactgagtttgatgacagcttgctgaggaatttcactctggtgacccagcacccggaggtgatttacacaaaccaaaatgttgtctggtcgaaatttgaaaccatcttcttcaccatctctggtctcatccattacgcaccagtgttcagagactatgtcttccggagcatgcaggagttctacgaggacaacgtgctctacatggagatcagagccaggctgctgccggtgtatgagctcagtggagagcaccatgacgaagagtggtcagtgaagacttaccaggaagtagctcagaagtttgtggaaactcaccctgagtttattggaatcaaaatcatttattcggatcacagatccaaagatgtggctgtcatcgcagaatccatccgaatggccatggggctccgaatcaagttccccacggtggtggcagggtttgacctggtggggcatgaggacactggccactccttgcatgactacaaggaagctctgatgatccccgccaaggatggcgttaagctgccttacttcttccacgccggagaaacagactggcagggtacttccatagacaggaacattctggatgctctgatgctgaacactaccagaatcggccatggatttgctttgagcaaacaccccgcagtcaggacttactcctggaaaaaggacatccccatagaagtctgtcccatctctaaccaggtgctgaaactggtgtctgacttgaggaaccaccctgtagccactctgatggccactgggcaccccatggtgatcagctctgatgacccagctatgtttggtgccaaaggcttgtcctacgatttctatgaggtcttcatgggcattggggggatgaaggctgacctgaggaccctcaaacagctggccatgaactctatcaagtacagtaccctgttggagagtgagaaaaatactttcatggaaatctggaagaagagatgggataagttcatagcagatgtggctacaaaggattacaaggatgacgacgataagtgagctagcccctctccctcccccccccctaacgttactggccgaagccgcttggaataaggccggtgtgcgtttgtctatatgttattttccaccatattgccgtcttttggcaatgtgagggcccggaaacctggccctgtcttcttgacgagcattcctaggggtctttcccctctcgccaaaggaatgcaaggtctgttgaatgtcgtgaaggaagcagttcctctggaagcttcttgaagacaaacaacgtctgtagcgaccctttgcaggcagcggaaccccccacctggcgacaggtgcctctgcggccaaaagccacgtgtataagatacacctgcaaaggcggcacaaccccagtgccacgttgtgagttggatagttgtggaaagagtcaaatggctctcctcaagcgtattcaacaaggggctgaaggatgcccagaaggtaccccattgtatgggatctgatctggggcctcggtacacatgctttacatgtgtttagtcgaggttaaaaaaacgtctaggccccccgaaccacggggacgtggttttcctttgaaaaacacgatgataatatggccacactagagatccaccggtcgccaccatggtgagcaagggcgaggagctgttcaccggggtggtgcccatcctggtcgagctggacggcgacgtaaacggccacaagttcagcgtgtccggcgagggcgagggcgatgccacctacggcaagctgaccctgaagttcatctgcaccaccggcaagctgcccgtgccctggcccaccctcgtgaccaccctgacctacggcgtgcagtgcttcagccgctaccccgaccacatgaagcagcacgacttcttcaagtccgccatgcccgaaggctacgtccaggagcgcaccatcttcttcaaggacgacggcaactacaagacccgcgccgaggtgaagttcgagggcgacaccctggtgaaccgcatcgagctgaagggcatcgacttcaaggaggacggcaacatcctggggcacaagctggagtacaactacaacagccacaacgtctatatcatggccgacaagcagaagaacggcatcaaggtgaacttcaagatccgccacaacatcgaggacggcagcgtgcagctcgccgaccactaccagcagaacacccccatcggcgacggccccgtgctgctgcccgacaaccactacctgagcacccagtccgccctgagcaaagaccccaacgagaagcgcgatcacatggtcctgctggagttcgtgaccgccgccgggatcactctcggcatggacgagctgtacaaggacccaccggtcgccaccatggccaagcctttgtctcaagaagaatccaccctcattgaaagagcaacggctacaatcaacagcatccccatctctgaagactacagcgtcgccagcgcagctctctctagcgacggccgcatcttcactggtgtcaatgtatatcattttactgggggaccttgtgcagaactcgtggtgctgggcactgctgctgctgcggcagctggcaacctgacttgtatcgtcgcgatcggaaatgagaacaggggcatcttgagcccctgcggacggtgccgacaggtgcttctcgatctgcatcctgggatcaaagccatagtgaaggacagtgatggacagccgacggcagttgggattcgtgaattgctgccctctggttatgtgtgggagggctaagcggccgcgtcgacaatcaacctctggattacaaaatttgtgaaagattgactggtattcttaactatgttgctccttttacgctatgtggatacgctgctttaatgcctttgtatcatgctattgcttcccgtatggctttcattttctcctccttgtataaatcctggttgctgtctctttatgaggagttgtggcccgttgtcaggcaacgtggcgtggtgtgcactgtgtttgctgacgcaacccccactggttggggcattgccaccacctgtcagctcctttccgggactttcgctttccccctccctattgccacggcggaactcatcgccgcctgccttgcccgctgctggacaggggctcggctgttgggcactgacaattccgtggtgttgtcggggaagctgacgtcctttccatggctgctcgcctgtgttgccacctggattctgcgcgggacgtccttctgctacgtcccttcggccctcaatccagcggaccttccttcccgcggcctgctgccggctctgcggcctcttccgcgtcttcgccttcgccctcagacgagtcggatctccctttgggccgcctccccgcctggaattcgagctcggtacctttaagaccaatgacttacaaggcagctgtagatcttagccactttttaaaagaaaaggggggactggaagggctaattcactcccaacgaagacaagatctgctttttgcttgtactgggtctctctggttagaccagatctgagcctgggagctctctggctaactagggaacccactgcttaagcctcaataaagcttgccttgagtgcttcaagtagtgtgtgcccgtctgttgtgtgactctggtaactagagatccctcagacccttttagtcagtgtggaaaatctctagcagtagtagttcatgtcatcttattattcagtatttataacttgcaaagaaatgaatatcagagagtgagaggaacttgtttattgcagcttataatggttacaaataaagcaatagcatcacaaatttcacaaataaagcatttttttcactgcattctagttgtggtttgtccaaactcatcaatgtatcttatcatgtctggctctagctatcccgcccctaactccgcccatcccgcccctaactccgcccagttccgcccattctccgccccatggctgactaattttttttatttatgcagaggccgaggccgcctcggcctctgagctattccagaagtagtgaggaggcttttttggaggcctagggacgtacccaattcgccctatagtgagtcgtattacgcgcgctcactggccgtcgttttacaacgtcgtgactgggaaaaccctggcgttacccaacttaatcgccttgcagcacatccccctttcgccagctggcgtaatagcgaagaggcccgcaccgatcgcccttcccaacagttgcgcagcctgaatggcgaatgggacgcgccctgtagcggcgcattaagcgcggcgggtgtggtggttacgcgcagcgtgaccgctacacttgccagcgccctagcgcccgctcctttcgctttcttcccttcctttctcgccacgttcgccggctttccccgtcaagctctaaatcgggggctccctttagggttccgatttagtgctttacggcacctcgaccccaaaaaacttgattagggtgatggttcacgtagtgggccatcgccctgatagacggtttttcgccctttgacgttggagtccacgttctttaatagtggactcttgttccaaactggaacaacactcaaccctatctcggtctattcttttgatttataagggattttgccgatttcggcctattggttaaaaaatgagctgatttaacaaaaatttaacgcgaattttaacaaaatattaacgcttacaatttaggtggcacttttcggggaaatgtgcgcggaacccctatttgtttatttttctaaatacattcaaatatgtatccgctcatgagacaataaccctgataaatgcttcaataatattgaaaaaggaagagtatgagtattcaacatttccgtgtcgcccttattcccttttttgcggcattttgccttcctgtttttgctcacccagaaacgctggtgaaagtaaaagatgctgaagatcagttgggtgcacgagtgggttacatcgaactggatctcaacagcggtaagatccttgagagttttcgccccgaagaacgttttccaatgatgagcacttttaaagttctgctatgtggcgcggtattatcccgtattgacgccgggcaagagcaactcggtcgccgcatacactattctcagaatgacttggttgagtactcaccagtcacagaaaagcatcttacggatggcatgacagtaagagaattatgcagtgctgccataaccatgagtgataacactgcggccaacttacttctgacaacgatcggaggaccgaaggagctaaccgcttttttgcacaacatgggggatcatgtaactcgccttgatcgttgggaaccggagctgaatgaagccataccaaacgacgagcgtgacaccacgatgcctgtagcaatggcaacaacgttgcgcaaactattaactggcgaactacttactctagcttcccggcaacaattaatagactggatggaggcggataaagttgcaggaccacttctgcgctcggcccttccggctggctggtttattgctgataaatctggagccggtgagcgtgggtctcgcggtatcattgcagcactggggccagatggtaagccctcccgtatcgtagttatctacacgacggggagtcaggcaactatggatgaacgaaatagacagatcgctgagataggtgcctcactgattaagcattggtaactgtcagaccaagtttactcatatatactttagattgatttaaaacttcatttttaatttaaaaggatctaggtgaagatcctttttgataatctcatgaccaaaatcccttaacgtgagttttcgttccactgagcgtcagaccccgtagaaaagatcaaaggatcttcttgagatcctttttttctgcgcgtaatctgctgcttgcaaacaaaaaaaccaccgctaccagcggtggtttgtttgccggatcaagagctaccaactctttttccgaaggtaactggcttcagcagagcgcagataccaaatactgttcttctagtgtagccgtagttaggccaccacttcaagaactctgtagcaccgcctacatacctcgctctgctaatcctgttaccagtggctgctgccagtggcgataagtcgtgtcttaccgggttggactcaagacgatagttaccggataaggcgcagcggtcgggctgaacggggggttcgtgcacacagcccagcttggagcgaacgacctacaccgaactgagatacctacagcgtgagctatgagaaagcgccacgcttcccgaagggagaaaggcggacaggtatccggtaagcggcagggtcggaacaggagagcgcacgagggagcttccagggggaaacgcctggtatctttatagtcctgtcgggtttcgccacctctgacttgagcgtcgatttttgtgatgctcgtcaggggggcggagcctatggaaaaacgccagcaacgcggcctttttacggttcctggccttttgctggccttttgctcacatgttctttcctgcgttatcccctgattctgtggataaccgtattaccgcctttgagtgagctgataccgctcgccgcagccgaacgaccgagcgcagcgagtcagtgagcgaggaagcggaagagcgcccaatacgcaaaccgcctctccccgcgcgttggccgattcattaatgcagctggcacgacaggtttcccgactggaaagcgggcagtgagcgcaacgcaattaatgtgagttagctcactcattaggcaccccaggctttacactttatgcttccggctcgtatgttgtgtggaattgtgagcggataacaatttcacacaggaaacagctatgaccatgattacgccaagcgcgcaattaaccctcactaaagggaacaaaagctggagctgc

SEQ ID NO: 11 - DNA, 1566 bp, Homo sapiens
  misc_feature 1..1566: note = ADA1
  source 1..1566: mol_type = genomic DNA
ggcccgttaagaagagcgtggccggccgcggccaccgctggccccagggaaagccgagcggccaccgagccggcagagacccaccgagcggcggcggagggagcagcgccggggcgcacgagggcaccatggcccagacgcccgccttcgacaagcccaaagtagaactgcatgtccacctagacggatccatcaagcctgaaaccatcttatactatggcaggaggagagggatcgccctcccagctaacacagcagaggggctgctgaacgtcattggcatggacaagccgctcacccttccagacttcctggccaagtttgactactacatgcctgctatcgcgggctgccgggaggctatcaaaaggatcgcctatgagtttgtagagatgaaggccaaagagggcgtggtgtatgtggaggtgcggtacagtccgcacctgctggccaactccaaagtggagccaatcccctggaaccaggctgaaggggacctcaccccagacgaggtggtggccctagtgggccagggcctgcaggagggggagcgagacttcggggtcaaggcccggtccatcctgtgctgcatgcgccaccagcccaactggtcccccaaggtggtggagctgtgtaagaagtaccagcagcagaccgtggtagccattgacctggctggagatgagaccatcccaggaagcagcctcttgcctggacatgtccaggcctaccaggaggctgtgaagagcggcattcaccgtactgtccacgccggggaggtgggctcggccgaagtagtaaaagaggctgtggacatactcaagacagagcggctgggacacggctaccacaccctggaagaccaggccctttataacaggctgcggcaggaaaacatgcacttcgagatctgcccctggtccagctacctcactggtgcctggaagccggacacggagcatgcagtcattcggctcaaaaatgaccaggctaactactcgctcaacacagatgacccgctcatcttcaagtccaccctggacactgattaccagatgaccaaacgggacatgggctttactgaagaggagtttaaaaggctgaacatcaatgcggccaaatctagtttcctcccagaagatgaaaagagggagcttctcgacctgctctataaagcctatgggatgccaccttcagcctctgcagggcagaacctctgaagacgccactcctccaagccttcaccctgtggagtcaccccaactctgtggggctgagcaacatttttacatttattccttccaagaagaccatgatctcaatagtcagttactgatgctcctgaaccctatgtgtccatttctgcacacacgtatacctcggcatggccgcgtcacttctctgattatgtgccctggccagggaccagcgcccttgcacatgggcatggttgaatctgaaaccctccttctgtggcaacttgtactgaaaatctggtgctcaataaagaagcccatggctggtggcatgcaaaaaaaaaaaaaaaaaaaaaaaaaaaaaaaaaaa

SEQ ID NO: 12 - protein, 363 aa, Homo sapiens
  REGION 1..363: note = ADA1 protein
MAQTPAFDKPKVELHVHLDGSIKPETILYYGRRRGIALPANTAEGLLNVIGMDKPLTLPDFLAKFDYYMPAIAGCREAIKRIAYEFVEMKAKEGVVYVEVRYSPHLLANSKVEPIPWNQAEGDLTPDEVVALVGQGLQEGERDFGVKARSILCCMRHQPNWSPKVVELCKKYQQQTVVAIDLAGDETIPGSSLLPGHVQAYQEAVKSGIHRTVHAGEVGSAEVVKEAVDILKTERLGHGYHTLEDQALYNRLRQENMHFEICPWSSYLTGAWKPDTEHAVIRLKNDQANYSLNTDDPLIFKSTLDTDYQMTKRDMGFTEEEFKRLNINAAKSSFLPEDEKRELLDLLYKAYGMPPSASAGQNL

SEQ ID NO: 13 - protein, 482 aa, synthetic construct
  REGION 1..482: note = human ADA2 K11A, mature numbering
IDETRAHLLLAEKMMRLGGRLVLNTKEELANERLMTLKIAEMKEAMRTLIFPPSMHFFQAKHLIERSQVFNILRMMPKGAALHLHDIGIVTMDWLVRNVTYRPHCHICFTPRGIMQFRFAHPTPRPSEKCSKWILLEDYRKRVQNVTEFDDSLLRNFTLVTQHPEVIYTNQNVVWSKFETIFFTISGLIHYAPVFRDYVFRSMQEFYEDNVLYMEIRARLLPVYELSGEHHDEEWSVKTYQEVAQKFVETHPEFIGIKIIYSDHRSKDVAVIAESIRMAMGLRIKFPTVVAGFDLVGHEDTGHSLHDYKEALMIPAKDGVKLPYFFHAGETDWQGTSIDRNILDALMLNTTRIGHGFALSKHPAVRTYSWKKDIPIEVCPISNQVLKLVSDLRNHPVATLMATGHPMVISSDDPAMFGAKGLSYDFYEVFMGIGGMKADLRTLKQLAMNSIKYSTLLESEKNTFMEIWKKRWDKFIADVATK

SEQ ID NO: 14 - protein, 482 aa, synthetic construct
  REGION 1..482: note = human ADA2 K11D, mature numbering
IDETRAHLLLDEKMMRLGGRLVLNTKEELANERLMTLKIAEMKEAMRTLIFPPSMHFFQAKHLIERSQVFNILRMMPKGAALHLHDIGIVTMDWLVRNVTYRPHCHICFTPRGIMQFRFAHPTPRPSEKCSKWILLEDYRKRVQNVTEFDDSLLRNFTLVTQHPEVIYTNQNVVWSKFETIFFTISGLIHYAPVFRDYVFRSMQEFYEDNVLYMEIRARLLPVYELSGEHHDEEWSVKTYQEVAQKFVETHPEFIGIKIIYSDHRSKDVAVIAESIRMAMGLRIKFPTVVAGFDLVGHEDTGHSLHDYKEALMIPAKDGVKLPYFFHAGETDWQGTSIDRNILDALMLNTTRIGHGFALSKHPAVRTYSWKKDIPIEVCPISNQVLKLVSDLRNHPVATLMATGHPMVISSDDPAMFGAKGLSYDFYEVFMGIGGMKADLRTLKQLAMNSIKYSTLLESEKNTFMEIWKKRWDKFIADVATK

SEQ ID NO: 15 - protein, 482 aa, synthetic construct
  REGION 1..482: note = human ADA2 K11E, mature numbering
IDETRAHLLLEEKMMRLGGRLVLNTKEELANERLMTLKIAEMKEAMRTLIFPPSMHFFQAKHLIERSQVFNILRMMPKGAALHLHDIGIVTMDWLVRNVTYRPHCHICFTPRGIMQFRFAHPTPRPSEKCSKWILLEDYRKRVQNVTEFDDSLLRNFTLVTQHPEVIYTNQNVVWSKFETIFFTISGLIHYAPVFRDYVFRSMQEFYEDNVLYMEIRARLLPVYELSGEHHDEEWSVKTYQEVAQKFVETHPEFIGIKIIYSDHRSKDVAVIAESIRMAMGLRIKFPTVVAGFDLVGHEDTGHSLHDYKEALMIPAKDGVKLPYFFHAGETDWQGTSIDRNILDALMLNTTRIGHGFALSKHPAVRTYSWKKDIPIEVCPISNQVLKLVSDLRNHPVATLMATGHPMVISSDDPAMFGAKGLSYDFYEVFMGIGGMKADLRTLKQLAMNSIKYSTLLESEKNTFMEIWKKRWDKFIADVATK

SEQ ID NO: 16 - protein, 482 aa, synthetic construct
  REGION 1..482: note = human ADA2 K13A, mature numbering
IDETRAHLLLKEAMMRLGGRLVLNTKEELANERLMTLKIAEMKEAMRTLIFPPSMHFFQAKHLIERSQVFNILRMMPKGAALHLHDIGIVTMDWLVRNVTYRPHCHICFTPRGIMQFRFAHPTPRPSEKCSKWILLEDYRKRVQNVTEFDDSLLRNFTLVTQHPEVIYTNQNVVWSKFETIFFTISGLIHYAPVFRDYVFRSMQEFYEDNVLYMEIRARLLPVYELSGEHHDEEWSVKTYQEVAQKFVETHPEFIGIKIIYSDHRSKDVAVIAESIRMAMGLRIKFPTVVAGFDLVGHEDTGHSLHDYKEALMIPAKDGVKLPYFFHAGETDWQGTSIDRNILDALMLNTTRIGHGFALSKHPAVRTYSWKKDIPIEVCPISNQVLKLVSDLRNHPVATLMATGHPMVISSDDPAMFGAKGLSYDFYEVFMGIGGMKADLRTLKQLAMNSIKYSTLLESEKNTFMEIWKKRWDKFIADVATK

SEQ ID NO: 17 - protein, 482 aa, synthetic construct
  REGION 1..482: note = human ADA2 K13D, mature numbering
IDETRAHLLLKEDMMRLGGRLVLNTKEELANERLMTLKIAEMKEAMRTLIFPPSMHFFQAKHLIERSQVFNILRMMPKGAALHLHDIGIVTMDWLVRNVTYRPHCHICFTPRGIMQFRFAHPTPRPSEKCSKWILLEDYRKRVQNVTEFDDSLLRNFTLVTQHPEVIYTNQNVVWSKFETIFFTISGLIHYAPVFRDYVFRSMQEFYEDNVLYMEIRARLLPVYELSGEHHDEEWSVKTYQEVAQKFVETHPEFIGIKIIYSDHRSKDVAVIAESIRMAMGLRIKFPTVVAGFDLVGHEDTGHSLHDYKEALMIPAKDGVKLPYFFHAGETDWQGTSIDRNILDALMLNTTRIGHGFALSKHPAVRTYSWKKDIPIEVCPISNQVLKLVSDLRNHPVATLMATGHPMVISSDDPAMFGAKGLSYDFYEVFMGIGGMKADLRTLKQLAMNSIKYSTLLESEKNTFMEIWKKRWDKFIADVATK

SEQ ID NO: 18 - protein, 482 aa, synthetic construct
  REGION 1..482: note = human ADA2 K13E, mature numbering
IDETRAHLLLKEEMMRLGGRLVLNTKEELANERLMTLKIAEMKEAMRTLIFPPSMHFFQAKHLIERSQVFNILRMMPKGAALHLHDIGIVTMDWLVRNVTYRPHCHICFTPRGIMQFRFAHPTPRPSEKCSKWILLEDYRKRVQNVTEFDDSLLRNFTLVTQHPEVIYTNQNVVWSKFETIFFTISGLIHYAPVFRDYVFRSMQEFYEDNVLYMEIRARLLPVYELSGEHHDEEWSVKTYQEVAQKFVETHPEFIGIKIIYSDHRSKDVAVIAESIRMAMGLRIKFPTVVAGFDLVGHEDTGHSLHDYKEALMIPAKDGVKLPYFFHAGETDWQGTSIDRNILDALMLNTTRIGHGFALSKHPAVRTYSWKKDIPIEVCPISNQVLKLVSDLRNHPVATLMATGHPMVISSDDPAMFGAKGLSYDFYEVFMGIGGMKADLRTLKQLAMNSIKYSTLLESEKNTFMEIWKKRWDKFIADVATK

SEQ ID NO: 19 - protein, 482 aa, synthetic construct
  REGION 1..482: note = human ADA2 K371A, mature numbering
IDETRAHLLLKEKMMRLGGRLVLNTKEELANERLMTLKIAEMKEAMRTLIFPPSMHFFQAKHLIERSQVFNILRMMPKGAALHLHDIGIVTMDWLVRNVTYRPHCHICFTPRGIMQFRFAHPTPRPSEKCSKWILLEDYRKRVQNVTEFDDSLLRNFTLVTQHPEVIYTNQNVVWSKFETIFFTISGLIHYAPVFRDYVFRSMQEFYEDNVLYMEIRARLLPVYELSGEHHDEEWSVKTYQEVAQKFVETHPEFIGIKIIYSDHRSKDVAVIAESIRMAMGLRIKFPTVVAGFDLVGHEDTGHSLHDYKEALMIPAKDGVKLPYFFHAGETDWQGTSIDRNILDALMLNTTRIGHGFALSKHPAVRTYSWAKDIPIEVCPISNQVLKLVSDLRNHPVATLMATGHPMVISSDDPAMFGAKGLSYDFYEVFMGIGGMKADLRTLKQLAMNSIKYSTLLESEKNTFMEIWKKRWDKFIADVATK

SEQ ID NO: 20 - protein, 482 aa, synthetic construct
  REGION 1..482: note = human ADA2 K371D, mature numbering
IDETRAHLLLKEKMMRLGGRLVLNTKEELANERLMTLKIAEMKEAMRTLIFPPSMHFFQAKHLIERSQVFNILRMMPKGAALHLHDIGIVTMDWLVRNVTYRPHCHICFTPRGIMQFRFAHPTPRPSEKCSKWILLEDYRKRVQNVTEFDDSLLRNFTLVTQHPEVIYTNQNVVWSKFETIFFTISGLIHYAPVFRDYVFRSMQEFYEDNVLYMEIRARLLPVYELSGEHHDEEWSVKTYQEVAQKFVETHPEFIGIKIIYSDHRSKDVAVIAESIRMAMGLRIKFPTVVAGFDLVGHEDTGHSLHDYKEALMIPAKDGVKLPYFFHAGETDWQGTSIDRNILDALMLNTTRIGHGFALSKHPAVRTYSWDKDIPIEVCPISNQVLKLVSDLRNHPVATLMATGHPMVISSDDPAMFGAKGLSYDFYEVFMGIGGMKADLRTLKQLAMNSIKYSTLLESEKNTFMEIWKKRWDKFIADVATK

SEQ ID NO: 21 - protein, 482 aa, synthetic construct
  REGION 1..482: note = human ADA2 K371E, mature numbering
IDETRAHLLLKEKMMRLGGRLVLNTKEELANERLMTLKIAEMKEAMRTLIFPPSMHFFQAKHLIERSQVFNILRMMPKGAALHLHDIGIVTMDWLVRNVTYRPHCHICFTPRGIMQFRFAHPTPRPSEKCSKWILLEDYRKRVQNVTEFDDSLLRNFTLVTQHPEVIYTNQNVVWSKFETIFFTISGLIHYAPVFRDYVFRSMQEFYEDNVLYMEIRARLLPVYELSGEHHDEEWSVKTYQEVAQKFVETHPEFIGIKIIYSDHRSKDVAVIAESIRMAMGLRIKFPTVVAGFDLVGHEDTGHSLHDYKEALMIPAKDGVKLPYFFHAGETDWQGTSIDRNILDALMLNTTRIGHGFALSKHPAVRTYSWEKDIPIEVCPISNQVLKLVSDLRNHPVATLMATGHPMVISSDDPAMFGAKGLSYDFYEVFMGIGGMKADLRTLKQLAMNSIKYSTLLESEKNTFMEIWKKRWDKFIADVATK

SEQ ID NO: 22 - protein, 482 aa, synthetic construct
  REGION 1..482: note = human ADA2 K372A, mature numbering
IDETRAHLLLKEKMMRLGGRLVLNTKEELANERLMTLKIAEMKEAMRTLIFPPSMHFFQAKHLIERSQVFNILRMMPKGAALHLHDIGIVTMDWLVRNVTYRPHCHICFTPRGIMQFRFAHPTPRPSEKCSKWILLEDYRKRVQNVTEFDDSLLRNFTLVTQHPEVIYTNQNVVWSKFETIFFTISGLIHYAPVFRDYVFRSMQEFYEDNVLYMEIRARLLPVYELSGEHHDEEWSVKTYQEVAQKFVETHPEFIGIKIIYSDHRSKDVAVIAESIRMAMGLRIKFPTVVAGFDLVGHEDTGHSLHDYKEALMIPAKDGVKLPYFFHAGETDWQGTSIDRNILDALMLNTTRIGHGFALSKHPAVRTYSWKADIPIEVCPISNQVLKLVSDLRNHPVATLMATGHPMVISSDDPAMFGAKGLSYDFYEVFMGIGGMKADLRTLKQLAMNSIKYSTLLESEKNTFMEIWKKRWDKFIADVATK

SEQ ID NO: 23 - protein, 482 aa, synthetic construct
  REGION 1..482: note = human ADA2 K372D, mature numbering
IDETRAHLLLKEKMMRLGGRLVLNTKEELANERLMTLKIAEMKEAMRTLIFPPSMHFFQAKHLIERSQVFNILRMMPKGAALHLHDIGIVTMDWLVRNVTYRPHCHICFTPRGIMQFRFAHPTPRPSEKCSKWILLEDYRKRVQNVTEFDDSLLRNFTLVTQHPEVIYTNQNVVWSKFETIFFTISGLIHYAPVFRDYVFRSMQEFYEDNVLYMEIRARLLPVYELSGEHHDEEWSVKTYQEVAQKFVETHPEFIGIKIIYSDHRSKDVAVIAESIRMAMGLRIKFPTVVAGFDLVGHEDTGHSLHDYKEALMIPAKDGVKLPYFFHAGETDWQGTSIDRNILDALMLNTTRIGHGFALSKHPAVRTYSWKDDIPIEVCPISNQVLKLVSDLRNHPVATLMATGHPMVISSDDPAMFGAKGLSYDFYEVFMGIGGMKADLRTLKQLAMNSIKYSTLLESEKNTFMEIWKKRWDKFIADVATK

SEQ ID NO: 24 - protein, 482 aa, synthetic construct
  REGION 1..482: note = human ADA2 K372E, mature numbering
IDETRAHLLLKEKMMRLGGRLVLNTKEELANERLMTLKIAEMKEAMRTLIFPPSMHFFQAKHLIERSQVFNILRMMPKGAALHLHDIGIVTMDWLVRNVTYRPHCHICFTPRGIMQFRFAHPTPRPSEKCSKWILLEDYRKRVQNVTEFDDSLLRNFTLVTQHPEVIYTNQNVVWSKFETIFFTISGLIHYAPVFRDYVFRSMQEFYEDNVLYMEIRARLLPVYELSGEHHDEEWSVKTYQEVAQKFVETHPEFIGIKIIYSDHRSKDVAVIAESIRMAMGLRIKFPTVVAGFDLVGHEDTGHSLHDYKEALMIPAKDGVKLPYFFHAGETDWQGTSIDRNILDALMLNTTRIGHGFALSKHPAVRTYSWKEDIPIEVCPISNQVLKLVSDLRNHPVATLMATGHPMVISSDDPAMFGAKGLSYDFYEVFMGIGGMKADLRTLKQLAMNSIKYSTLLESEKNTFMEIWKKRWDKFIADVATK

SEQ ID NO: 25 - protein, 482 aa, synthetic construct
  REGION 1..482: note = human ADA2 K452A, mature numbering
IDETRAHLLLKEKMMRLGGRLVLNTKEELANERLMTLKIAEMKEAMRTLIFPPSMHFFQAKHLIERSQVFNILRMMPKGAALHLHDIGIVTMDWLVRNVTYRPHCHICFTPRGIMQFRFAHPTPRPSEKCSKWILLEDYRKRVQNVTEFDDSLLRNFTLVTQHPEVIYTNQNVVWSKFETIFFTISGLIHYAPVFRDYVFRSMQEFYEDNVLYMEIRARLLPVYELSGEHHDEEWSVKTYQEVAQKFVETHPEFIGIKIIYSDHRSKDVAVIAESIRMAMGLRIKFPTVVAGFDLVGHEDTGHSLHDYKEALMIPAKDGVKLPYFFHAGETDWQGTSIDRNILDALMLNTTRIGHGFALSKHPAVRTYSWKKDIPIEVCPISNQVLKLVSDLRNHPVATLMATGHPMVISSDDPAMFGAKGLSYDFYEVFMGIGGMKADLRTLKQLAMNSIAYSTLLESEKNTFMEIWKKRWDKFIADVATK

SEQ ID NO: 26 - protein, 482 aa, synthetic construct
  REGION 1..482: note = human ADA2 K452D, mature numbering
IDETRAHLLLKEKMMRLGGRLVLNTKEELANERLMTLKIAEMKEAMRTLIFPPSMHFFQAKHLIERSQVFNILRMMPKGAALHLHDIGIVTMDWLVRNVTYRPHCHICFTPRGIMQFRFAHPTPRPSEKCSKWILLEDYRKRVQNVTEFDDSLLRNFTLVTQHPEVIYTNQNVVWSKFETIFFTISGLIHYAPVFRDYVFRSMQEFYEDNVLYMEIRARLLPVYELSGEHHDEEWSVKTYQEVAQKFVETHPEFIGIKIIYSDHRSKDVAVIAESIRMAMGLRIKFPTVVAGFDLVGHEDTGHSLHDYKEALMIPAKDGVKLPYFFHAGETDWQGTSIDRNILDALMLNTTRIGHGFALSKHPAVRTYSWKKDIPIEVCPISNQVLKLVSDLRNHPVATLMATGHPMVISSDDPAMFGAKGLSYDFYEVFMGIGGMKADLRTLKQLAMNSIDYSTLLESEKNTFMEIWKKRWDKFIADVATK

SEQ ID NO: 27 - protein, 482 aa, synthetic construct
  REGION 1..482: note = human ADA2 K452E, mature numbering
IDETRAHLLLKEKMMRLGGRLVLNTKEELANERLMTLKIAEMKEAMRTLIFPPSMHFFQAKHLIERSQVFNILRMMPKGAALHLHDIGIVTMDWLVRNVTYRPHCHICFTPRGIMQFRFAHPTPRPSEKCSKWILLEDYRKRVQNVTEFDDSLLRNFTLVTQHPEVIYTNQNVVWSKFETIFFTISGLIHYAPVFRDYVFRSMQEFYEDNVLYMEIRARLLPVYELSGEHHDEEWSVKTYQEVAQKFVETHPEFIGIKIIYSDHRSKDVAVIAESIRMAMGLRIKFPTVVAGFDLVGHEDTGHSLHDYKEALMIPAKDGVKLPYFFHAGETDWQGTSIDRNILDALMLNTTRIGHGFALSKHPAVRTYSWKKDIPIEVCPISNQVLKLVSDLRNHPVATLMATGHPMVISSDDPAMFGAKGLSYDFYEVFMGIGGMKADLRTLKQLAMNSIEYSTLLESEKNTFMEIWKKRWDKFIADVATK

SEQ ID NO: 28 - protein, 482 aa, synthetic construct
  REGION 1..482: note = human ADA2 R20A, mature numbering
IDETRAHLLLKEKMMRLGGALVLNTKEELANERLMTLKIAEMKEAMRTLIFPPSMHFFQAKHLIERSQVFNILRMMPKGAALHLHDIGIVTMDWLVRNVTYRPHCHICFTPRGIMQFRFAHPTPRPSEKCSKWILLEDYRKRVQNVTEFDDSLLRNFTLVTQHPEVIYTNQNVVWSKFETIFFTISGLIHYAPVFRDYVFRSMQEFYEDNVLYMEIRARLLPVYELSGEHHDEEWSVKTYQEVAQKFVETHPEFIGIKIIYSDHRSKDVAVIAESIRMAMGLRIKFPTVVAGFDLVGHEDTGHSLHDYKEALMIPAKDGVKLPYFFHAGETDWQGTSIDRNILDALMLNTTRIGHGFALSKHPAVRTYSWKKDIPIEVCPISNQVLKLVSDLRNHPVATLMATGHPMVISSDDPAMFGAKGLSYDFYEVFMGIGGMKADLRTLKQLAMNSIKYSTLLESEKNTFMEIWKKRWDKFIADVATK

SEQ ID NO: 29 - protein, 482 aa, synthetic construct
  REGION 1..482: note = human ADA2 R20D, mature numbering
IDETRAHLLLKEKMMRLGGDLVLNTKEELANERLMTLKIAEMKEAMRTLIFPPSMHFFQAKHLIERSQVFNILRMMPKGAALHLHDIGIVTMDWLVRNVTYRPHCHICFTPRGIMQFRFAHPTPRPSEKCSKWILLEDYRKRVQNVTEFDDSLLRNFTLVTQHPEVIYTNQNVVWSKFETIFFTISGLIHYAPVFRDYVFRSMQEFYEDNVLYMEIRARLLPVYELSGEHHDEEWSVKTYQEVAQKFVETHPEFIGIKIIYSDHRSKDVAVIAESIRMAMGLRIKFPTVVAGFDLVGHEDTGHSLHDYKEALMIPAKDGVKLPYFFHAGETDWQGTSIDRNILDALMLNTTRIGHGFALSKHPAVRTYSWKKDIPIEVCPISNQVLKLVSDLRNHPVATLMATGHPMVISSDDPAMFGAKGLSYDFYEVFMGIGGMKADLRTLKQLAMNSIKYSTLLESEKNTFMEIWKKRWDKFIADVATK

SEQ ID NO: 30 - protein, 482 aa, synthetic construct
  REGION 1..482: note = human ADA2 R20E, mature numbering
IDETRAHLLLKEKMMRLGGELVLNTKEELANERLMTLKIAEMKEAMRTLIFPPSMHFFQAKHLIERSQVFNILRMMPKGAALHLHDIGIVTMDWLVRNVTYRPHCHICFTPRGIMQFRFAHPTPRPSEKCSKWILLEDYRKRVQNVTEFDDSLLRNFTLVTQHPEVIYTNQNVVWSKFETIFFTISGLIHYAPVFRDYVFRSMQEFYEDNVLYMEIRARLLPVYELSGEHHDEEWSVKTYQEVAQKFVETHPEFIGIKIIYSDHRSKDVAVIAESIRMAMGLRIKFPTVVAGFDLVGHEDTGHSLHDYKEALMIPAKDGVKLPYFFHAGETDWQGTSIDRNILDALMLNTTRIGHGFALSKHPAVRTYSWKKDIPIEVCPISNQVLKLVSDLRNHPVATLMATGHPMVISSDDPAMFGAKGLSYDFYEVFMGIGGMKADLRTLKQLAMNSIKYSTLLESEKNTFMEIWKKRWDKFIADVATK

SEQ ID NO: 31 - protein, 482 aa, synthetic construct
  REGION 1..482: note = human ADA2 R366A, mature numbering
IDETRAHLLLKEKMMRLGGRLVLNTKEELANERLMTLKIAEMKEAMRTLIFPPSMHFFQAKHLIERSQVFNILRMMPKGAALHLHDIGIVTMDWLVRNVTYRPHCHICFTPRGIMQFRFAHPTPRPSEKCSKWILLEDYRKRVQNVTEFDDSLLRNFTLVTQHPEVIYTNQNVVWSKFETIFFTISGLIHYAPVFRDYVFRSMQEFYEDNVLYMEIRARLLPVYELSGEHHDEEWSVKTYQEVAQKFVETHPEFIGIKIIYSDHRSKDVAVIAESIRMAMGLRIKFPTVVAGFDLVGHEDTGHSLHDYKEALMIPAKDGVKLPYFFHAGETDWQGTSIDRNILDALMLNTTRIGHGFALSKHPAVATYSWKKDIPIEVCPISNQVLKLVSDLRNHPVATLMATGHPMVISSDDPAMFGAKGLSYDFYEVFMGIGGMKADLRTLKQLAMNSIKYSTLLESEKNTFMEIWKKRWDKFIADVATK

SEQ ID NO: 32 - protein, 482 aa, synthetic construct
  REGION 1..482: note = human ADA2 R366D, mature numbering
IDETRAHLLLKEKMMRLGGRLVLNTKEELANERLMTLKIAEMKEAMRTLIFPPSMHFFQAKHLIERSQVFNILRMMPKGAALHLHDIGIVTMDWLVRNVTYRPHCHICFTPRGIMQFRFAHPTPRPSEKCSKWILLEDYRKRVQNVTEFDDSLLRNFTLVTQHPEVIYTNQNVVWSKFETIFFTISGLIHYAPVFRDYVFRSMQEFYEDNVLYMEIRARLLPVYELSGEHHDEEWSVKTYQEVAQKFVETHPEFIGIKIIYSDHRSKDVAVIAESIRMAMGLRIKFPTVVAGFDLVGHEDTGHSLHDYKEALMIPAKDGVKLPYFFHAGETDWQGTSIDRNILDALMLNTTRIGHGFALSKHPAVDTYSWKKDIPIEVCPISNQVLKLVSDLRNHPVATLMATGHPMVISSDDPAMFGAKGLSYDFYEVFMGIGGMKADLRTLKQLAMNSIKYSTLLESEKNTFMEIWKKRWDKFIADVATK

SEQ ID NO: 33 - protein, 482 aa, synthetic construct
  REGION 1..482: note = human ADA2 R366E, mature numbering
IDETRAHLLLKEKMMRLGGRLVLNTKEELANERLMTLKIAEMKEAMRTLIFPPSMHFFQAKHLIERSQVFNILRMMPKGAALHLHDIGIVTMDWLVRNVTYRPHCHICFTPRGIMQFRFAHPTPRPSEKCSKWILLEDYRKRVQNVTEFDDSLLRNFTLVTQHPEVIYTNQNVVWSKFETIFFTISGLIHYAPVFRDYVFRSMQEFYEDNVLYMEIRARLLPVYELSGEHHDEEWSVKTYQEVAQKFVETHPEFIGIKIIYSDHRSKDVAVIAESIRMAMGLRIKFPTVVAGFDLVGHEDTGHSLHDYKEALMIPAKDGVKLPYFFHAGETDWQGTSIDRNILDALMLNTTRIGHGFALSKHPAVETYSWKKDIPIEVCPISNQVLKLVSDLRNHPVATLMATGHPMVISSDDPAMFGAKGLSYDFYEVFMGIGGMKADLRTLKQLAMNSIKYSTLLESEKNTFMEIWKKRWDKFIADVATK

SEQ ID NO: 34 - protein, 482 aa, synthetic construct
  REGION 1..482: note = human ADA2 H264A, mature numbering
IDETRAHLLLKEKMMRLGGRLVLNTKEELANERLMTLKIAEMKEAMRTLIFPPSMHFFQAKHLIERSQVFNILRMMPKGAALHLHDIGIVTMDWLVRNVTYRPHCHICFTPRGIMQFRFAHPTPRPSEKCSKWILLEDYRKRVQNVTEFDDSLLRNFTLVTQHPEVIYTNQNVVWSKFETIFFTISGLIHYAPVFRDYVFRSMQEFYEDNVLYMEIRARLLPVYELSGEHHDEEWSVKTYQEVAQKFVETHPEFIGIKIIYSDARSKDVAVIAESIRMAMGLRIKFPTVVAGFDLVGHEDTGHSLHDYKEALMIPAKDGVKLPYFFHAGETDWQGTSIDRNILDALMLNTTRIGHGFALSKHPAVRTYSWKKDIPIEVCPISNQVLKLVSDLRNHPVATLMATGHPMVISSDDPAMFGAKGLSYDFYEVFMGIGGMKADLRTLKQLAMNSIKYSTLLESEKNTFMEIWKKRWDKFIADVATK

SEQ ID NO: 35 - protein, 482 aa, synthetic construct
  REGION 1..482: note = human ADA2 H264Q, mature numbering
IDETRAHLLLKEKMMRLGGRLVLNTKEELANERLMTLKIAEMKEAMRTLIFPPSMHFFQAKHLIERSQVFNILRMMPKGAALHLHDIGIVTMDWLVRNVTYRPHCHICFTPRGIMQFRFAHPTPRPSEKCSKWILLEDYRKRVQNVTEFDDSLLRNFTLVTQHPEVIYTNQNVVWSKFETIFFTISGLIHYAPVFRDYVFRSMQEFYEDNVLYMEIRARLLPVYELSGEHHDEEWSVKTYQEVAQKFVETHPEFIGIKIIYSDQRSKDVAVIAESIRMAMGLRIKFPTVVAGFDLVGHEDTGHSLHDYKEALMIPAKDGVKLPYFFHAGETDWQGTSIDRNILDALMLNTTRIGHGFALSKHPAVRTYSWKKDIPIEVCPISNQVLKLVSDLRNHPVATLMATGHPMVISSDDPAMFGAKGLSYDFYEVFMGIGGMKADLRTLKQLAMNSIKYSTLLESEKNTFMEIWKKRWDKFIADVATK

SEQ ID NO: 36 - protein, 482 aa, synthetic construct
  REGION 1..482: note = human ADA2 H264N, mature numbering
IDETRAHLLLKEKMMRLGGRLVLNTKEELANERLMTLKIAEMKEAMRTLIFPPSMHFFQAKHLIERSQVFNILRMMPKGAALHLHDIGIVTMDWLVRNVTYRPHCHICFTPRGIMQFRFAHPTPRPSEKCSKWILLEDYRKRVQNVTEFDDSLLRNFTLVTQHPEVIYTNQNVVWSKFETIFFTISGLIHYAPVFRDYVFRSMQEFYEDNVLYMEIRARLLPVYELSGEHHDEEWSVKTYQEVAQKFVETHPEFIGIKIIYSDNRSKDVAVIAESIRMAMGLRIKFPTVVAGFDLVGHEDTGHSLHDYKEALMIPAKDGVKLPYFFHAGETDWQGTSIDRNILDALMLNTTRIGHGFALSKHPAVRTYSWKKDIPIEVCPISNQVLKLVSDLRNHPVATLMATGHPMVISSDDPAMFGAKGLSYDFYEVFMGIGGMKADLRTLKQLAMNSIKYSTLLESEKNTFMEIWKKRWDKFIADVATK

SEQ ID NO: 37 - protein, 482 aa, synthetic construct
  REGION 1..482: note = human ADA2 H264G, mature numbering
IDETRAHLLLKEKMMRLGGRLVLNTKEELANERLMTLKIAEMKEAMRTLIFPPSMHFFQAKHLIERSQVFNILRMMPKGAALHLHDIGIVTMDWLVRNVTYRPHCHICFTPRGIMQFRFAHPTPRPSEKCSKWILLEDYRKRVQNVTEFDDSLLRNFTLVTQHPEVIYTNQNVVWSKFETIFFTISGLIHYAPVFRDYVFRSMQEFYEDNVLYMEIRARLLPVYELSGEHHDEEWSVKTYQEVAQKFVETHPEFIGIKIIYSDGRSKDVAVIAESIRMAMGLRIKFPTVVAGFDLVGHEDTGHSLHDYKEALMIPAKDGVKLPYFFHAGETDWQGTSIDRNILDALMLNTTRIGHGFALSKHPAVRTYSWKKDIPIEVCPISNQVLKLVSDLRNHPVATLMATGHPMVISSDDPAMFGAKGLSYDFYEVFMGIGGMKADLRTLKQLAMNSIKYSTLLESEKNTFMEIWKKRWDKFIADVATK

SEQ ID NO: 38 - protein, 482 aa, synthetic construct
  REGION 1..482: note = human ADA2 R219K, mature numbering
IDETRAHLLLKEKMMRLGGRLVLNTKEELANERLMTLKIAEMKEAMRTLIFPPSMHFFQAKHLIERSQVFNILRMMPKGAALHLHDIGIVTMDWLVRNVTYRPHCHICFTPRGIMQFRFAHPTPRPSEKCSKWILLEDYRKRVQNVTEFDDSLLRNFTLVTQHPEVIYTNQNVVWSKFETIFFTISGLIHYAPVFRDYVFRSMQEFYEDNVLYMEIRAKLLPVYELSGEHHDEEWSVKTYQEVAQKFVETHPEFIGIKIIYSDHRSKDVAVIAESIRMAMGLRIKFPTVVAGFDLVGHEDTGHSLHDYKEALMIPAKDGVKLPYFFHAGETDWQGTSIDRNILDALMLNTTRIGHGFALSKHPAVRTYSWKKDIPIEVCPISNQVLKLVSDLRNHPVATLMATGHPMVISSDDPAMFGAKGLSYDFYEVFMGIGGMKADLRTLKQLAMNSIKYSTLLESEKNTFMEIWKKRWDKFIADVATK

SEQ ID NO: 39 - protein, 482 aa, synthetic construct
  REGION 1..482: note = human ADA2 R219Q, mature numbering
IDETRAHLLLKEKMMRLGGRLVLNTKEELANERLMTLKIAEMKEAMRTLIFPPSMHFFQAKHLIERSQVFNILRMMPKGAALHLHDIGIVTMDWLVRNVTYRPHCHICFTPRGIMQFRFAHPTPRPSEKCSKWILLEDYRKRVQNVTEFDDSLLRNFTLVTQHPEVIYTNQNVVWSKFETIFFTISGLIHYAPVFRDYVFRSMQEFYEDNVLYMEIRAQLLPVYELSGEHHDEEWSVKTYQEVAQKFVETHPEFIGIKIIYSDHRSKDVAVIAESIRMAMGLRIKFPTVVAGFDLVGHEDTGHSLHDYKEALMIPAKDGVKLPYFFHAGETDWQGTSIDRNILDALMLNTTRIGHGFALSKHPAVRTYSWKKDIPIEVCPISNQVLKLVSDLRNHPVATLMATGHPMVISSDDPAMFGAKGLSYDFYEVFMGIGGMKADLRTLKQLAMNSIKYSTLLESEKNTFMEIWKKRWDKFIADVATK

SEQ ID NO: 40 - protein, 482 aa, synthetic construct
  REGION 1..482: note = human ADA2 R219N, mature numbering
IDETRAHLLLKEKMMRLGGRLVLNTKEELANERLMTLKIAEMKEAMRTLIFPPSMHFFQAKHLIERSQVFNILRMMPKGAALHLHDIGIVTMDWLVRNVTYRPHCHICFTPRGIMQFRFAHPTPRPSEKCSKWILLEDYRKRVQNVTEFDDSLLRNFTLVTQHPEVIYTNQNVVWSKFETIFFTISGLIHYAPVFRDYVFRSMQEFYEDNVLYMEIRANLLPVYELSGEHHDEEWSVKTYQEVAQKFVETHPEFIGIKIIYSDHRSKDVAVIAESIRMAMGLRIKFPTVVAGFDLVGHEDTGHSLHDYKEALMIPAKDGVKLPYFFHAGETDWQGTSIDRNILDALMLNTTRIGHGFALSKHPAVRTYSWKKDIPIEVCPISNQVLKLVSDLRNHPVATLMATGHPMVISSDDPAMFGAKGLSYDFYEVFMGIGGMKADLRTLKQLAMNSIKYSTLLESEKNTFMEIWKKRWDKFIADVATK

SEQ ID NO: 41 - protein, 482 aa, synthetic construct
  REGION 1..482: note = human ADA2 R219A, mature numbering
IDETRAHLLLKEKMMRLGGRLVLNTKEELANERLMTLKIAEMKEAMRTLIFPPSMHFFQAKHLIERSQVFNILRMMPKGAALHLHDIGIVTMDWLVRNVTYRPHCHICFTPRGIMQFRFAHPTPRPSEKCSKWILLEDYRKRVQNVTEFDDSLLRNFTLVTQHPEVIYTNQNVVWSKFETIFFTISGLIHYAPVFRDYVFRSMQEFYEDNVLYMEIRAALLPVYELSGEHHDEEWSVKTYQEVAQKFVETHPEFIGIKIIYSDHRSKDVAVIAESIRMAMGLRIKFPTVVAGFDLVGHEDTGHSLHDYKEALMIPAKDGVKLPYFFHAGETDWQGTSIDRNILDALMLNTTRIGHGFALSKHPAVRTYSWKKDIPIEVCPISNQVLKLVSDLRNHPVATLMATGHPMVISSDDPAMFGAKGLSYDFYEVFMGIGGMKADLRTLKQLAMNSIKYSTLLESEKNTFMEIWKKRWDKFIADVATK

SEQ ID NO: 42 - protein, 482 aa, synthetic construct
  REGION 1..482: note = human ADA2 L221A, mature numbering
IDETRAHLLLKEKMMRLGGRLVLNTKEELANERLMTLKIAEMKEAMRTLIFPPSMHFFQAKHLIERSQVFNILRMMPKGAALHLHDIGIVTMDWLVRNVTYRPHCHICFTPRGIMQFRFAHPTPRPSEKCSKWILLEDYRKRVQNVTEFDDSLLRNFTLVTQHPEVIYTNQNVVWSKFETIFFTISGLIHYAPVFRDYVFRSMQEFYEDNVLYMEIRARLAPVYELSGEHHDEEWSVKTYQEVAQKFVETHPEFIGIKIIYSDHRSKDVAVIAESIRMAMGLRIKFPTVVAGFDLVGHEDTGHSLHDYKEALMIPAKDGVKLPYFFHAGETDWQGTSIDRNILDALMLNTTRIGHGFALSKHPAVRTYSWKKDIPIEVCPISNQVLKLVSDLRNHPVATLMATGHPMVISSDDPAMFGAKGLSYDFYEVFMGIGGMKADLRTLKQLAMNSIKYSTLLESEKNTFMEIWKKRWDKFIADVATK

SEQ ID NO: 43 - protein, 482 aa, synthetic construct
  REGION 1..482: note = human ADA2 L221V, mature numbering
IDETRAHLLLKEKMMRLGGRLVLNTKEELANERLMTLKIAEMKEAMRTLIFPPSMHFFQAKHLIERSQVFNILRMMPKGAALHLHDIGIVTMDWLVRNVTYRPHCHICFTPRGIMQFRFAHPTPRPSEKCSKWILLEDYRKRVQNVTEFDDSLLRNFTLVTQHPEVIYTNQNVVWSKFETIFFTISGLIHYAPVFRDYVFRSMQEFYEDNVLYMEIRARLVPVYELSGEHHDEEWSVKTYQEVAQKFVETHPEFIGIKIIYSDHRSKDVAVIAESIRMAMGLRIKFPTVVAGFDLVGHEDTGHSLHDYKEALMIPAKDGVKLPYFFHAGETDWQGTSIDRNILDALMLNTTRIGHGFALSKHPAVRTYSWKKDIPIEVCPISNQVLKLVSDLRNHPVATLMATGHPMVISSDDPAMFGAKGLSYDFYEVFMGIGGMKADLRTLKQLAMNSIKYSTLLESEKNTFMEIWKKRWDKFIADVATK

SEQ ID NO: 44 - protein, 482 aa, synthetic construct
  REGION 1..482: note = human ADA2 L221G, mature numbering
IDETRAHLLLKEKMMRLGGRLVLNTKEELANERLMTLKIAEMKEAMRTLIFPPSMHFFQAKHLIERSQVFNILRMMPKGAALHLHDIGIVTMDWLVRNVTYRPHCHICFTPRGIMQFRFAHPTPRPSEKCSKWILLEDYRKRVQNVTEFDDSLLRNFTLVTQHPEVIYTNQNVVWSKFETIFFTISGLIHYAPVFRDYVFRSMQEFYEDNVLYMEIRARLGPVYELSGEHHDEEWSVKTYQEVAQKFVETHPEFIGIKIIYSDHRSKDVAVIAESIRMAMGLRIKFPTVVAGFDLVGHEDTGHSLHDYKEALMIPAKDGVKLPYFFHAGETDWQGTSIDRNILDALMLNTTRIGHGFALSKHPAVRTYSWKKDIPIEVCPISNQVLKLVSDLRNHPVATLMATGHPMVISSDDPAMFGAKGLSYDFYEVFMGIGGMKADLRTLKQLAMNSIKYSTLLESEKNTFMEIWKKRWDKFIADVATK

SEQ ID NO: 45 - protein, 482 aa, synthetic construct
  REGION 1..482: note = human ADA2 E179D, mature numbering
IDETRAHLLLKEKMMRLGGRLVLNTKEELANERLMTLKIAEMKEAMRTLIFPPSMHFFQAKHLIERSQVFNILRMMPKGAALHLHDIGIVTMDWLVRNVTYRPHCHICFTPRGIMQFRFAHPTPRPSEKCSKWILLEDYRKRVQNVTEFDDSLLRNFTLVTQHPEVIYTNQNVVWSKFDTIFFTISGLIHYAPVFRDYVFRSMQEFYEDNVLYMEIRARLLPVYELSGEHHDEEWSVKTYQEVAQKFVETHPEFIGIKIIYSDHRSKDVAVIAESIRMAMGLRIKFPTVVAGFDLVGHEDTGHSLHDYKEALMIPAKDGVKLPYFFHAGETDWQGTSIDRNILDALMLNTTRIGHGFALSKHPAVRTYSWKKDIPIEVCPISNQVLKLVSDLRNHPVATLMATGHPMVISSDDPAMFGAKGLSYDFYEVFMGIGGMKADLRTLKQLAMNSIKYSTLLESEKNTFMEIWKKRWDKFIADVATK

SEQ ID NO: 46 - protein, 482 aa, synthetic construct
  REGION 1..482: note = human ADA2 E179A, mature numbering
IDETRAHLLLKEKMMRLGGRLVLNTKEELANERLMTLKIAEMKEAMRTLIFPPSMHFFQAKHLIERSQVFNILRMMPKGAALHLHDIGIVTMDWLVRNVTYRPHCHICFTPRGIMQFRFAHPTPRPSEKCSKWILLEDYRKRVQNVTEFDDSLLRNFTLVTQHPEVIYTNQNVVWSKFATIFFTISGLIHYAPVFRDYVFRSMQEFYEDNVLYMEIRARLLPVYELSGEHHDEEWSVKTYQEVAQKFVETHPEFIGIKIIYSDHRSKDVAVIAESIRMAMGLRIKFPTVVAGFDLVGHEDTGHSLHDYKEALMIPAKDGVKLPYFFHAGETDWQGTSIDRNILDALMLNTTRIGHGFALSKHPAVRTYSWKKDIPIEVCPISNQVLKLVSDLRNHPVATLMATGHPMVISSDDPAMFGAKGLSYDFYEVFMGIGGMKADLRTLKQLAMNSIKYSTLLESEKNTFMEIWKKRWDKFIADVATK

SEQ ID NO: 47 - protein, 482 aa, synthetic construct
  REGION 1..482: note = human ADA2 E179S, mature numbering
IDETRAHLLLKEKMMRLGGRLVLNTKEELANERLMTLKIAEMKEAMRTLIFPPSMHFFQAKHLIERSQVFNILRMMPKGAALHLHDIGIVTMDWLVRNVTYRPHCHICFTPRGIMQFRFAHPTPRPSEKCSKWILLEDYRKRVQNVTEFDDSLLRNFTLVTQHPEVIYTNQNVVWSKFSTIFFTISGLIHYAPVFRDYVFRSMQEFYEDNVLYMEIRARLLPVYELSGEHHDEEWSVKTYQEVAQKFVETHPEFIGIKIIYSDHRSKDVAVIAESIRMAMGLRIKFPTVVAGFDLVGHEDTGHSLHDYKEALMIPAKDGVKLPYFFHAGETDWQGTSIDRNILDALMLNTTRIGHGFALSKHPAVRTYSWKKDIPIEVCPISNQVLKLVSDLRNHPVATLMATGHPMVISSDDPAMFGAKGLSYDFYEVFMGIGGMKADLRTLKQLAMNSIKYSTLLESEKNTFMEIWKKRWDKFIADVATK

SEQ ID NO: 48 - protein, 482 aa, synthetic construct
  REGION 1..482: note = human ADA2 E179T, mature numbering
IDETRAHLLLKEKMMRLGGRLVLNTKEELANERLMTLKIAEMKEAMRTLIFPPSMHFFQAKHLIERSQVFNILRMMPKGAALHLHDIGIVTMDWLVRNVTYRPHCHICFTPRGIMQFRFAHPTPRPSEKCSKWILLEDYRKRVQNVTEFDDSLLRNFTLVTQHPEVIYTNQNVVWSKFTTIFFTISGLIHYAPVFRDYVFRSMQEFYEDNVLYMEIRARLLPVYELSGEHHDEEWSVKTYQEVAQKFVETHPEFIGIKIIYSDHRSKDVAVIAESIRMAMGLRIKFPTVVAGFDLVGHEDTGHSLHDYKEALMIPAKDGVKLPYFFHAGETDWQGTSIDRNILDALMLNTTRIGHGFALSKHPAVRTYSWKKDIPIEVCPISNQVLKLVSDLRNHPVATLMATGHPMVISSDDPAMFGAKGLSYDFYEVFMGIGGMKADLRTLKQLAMNSIKYSTLLESEKNTFMEIWKKRWDKFIADVATK

SEQ ID NO: 49 - protein, 482 aa, synthetic construct
  REGION 1..482: note = human ADA2 E179V, mature numbering
IDETRAHLLLKEKMMRLGGRLVLNTKEELANERLMTLKIAEMKEAMRTLIFPPSMHFFQAKHLIERSQVFNILRMMPKGAALHLHDIGIVTMDWLVRNVTYRPHCHICFTPRGIMQFRFAHPTPRPSEKCSKWILLEDYRKRVQNVTEFDDSLLRNFTLVTQHPEVIYTNQNVVWSKFVTIFFTISGLIHYAPVFRDYVFRSMQEFYEDNVLYMEIRARLLPVYELSGEHHDEEWSVKTYQEVAQKFVETHPEFIGIKIIYSDHRSKDVAVIAESIRMAMGLRIKFPTVVAGFDLVGHEDTGHSLHDYKEALMIPAKDGVKLPYFFHAGETDWQGTSIDRNILDALMLNTTRIGHGFALSKHPAVRTYSWKKDIPIEVCPISNQVLKLVSDLRNHPVATLMATGHPMVISSDDPAMFGAKGLSYDFYEVFMGIGGMKADLRTLKQLAMNSIKYSTLLESEKNTFMEIWKKRWDKFIADVATK

SEQ ID NO: 50 - protein, 482 aa, synthetic construct
  REGION 1..482: note = human ADA2 E179G, mature numbering
IDETRAHLLLKEKMMRLGGRLVLNTKEELANERLMTLKIAEMKEAMRTLIFPPSMHFFQAKHLIERSQVFNILRMMPKGAALHLHDIGIVTMDWLVRNVTYRPHCHICFTPRGIMQFRFAHPTPRPSEKCSKWILLEDYRKRVQNVTEFDDSLLRNFTLVTQHPEVIYTNQNVVWSKFGTIFFTISGLIHYAPVFRDYVFRSMQEFYEDNVLYMEIRARLLPVYELSGEHHDEEWSVKTYQEVAQKFVETHPEFIGIKIIYSDHRSKDVAVIAESIRMAMGLRIKFPTVVAGFDLVGHEDTGHSLHDYKEALMIPAKDGVKLPYFFHAGETDWQGTSIDRNILDALMLNTTRIGHGFALSKHPAVRTYSWKKDIPIEVCPISNQVLKLVSDLRNHPVATLMATGHPMVISSDDPAMFGAKGLSYDFYEVFMGIGGMKADLRTLKQLAMNSIKYSTLLESEKNTFMEIWKKRWDKFIADVATK

SEQ ID NO: 51 - protein, 482 aa, synthetic construct
  REGION 1..482: note = human ADA2 S262A, mature numbering
IDETRAHLLLKEKMMRLGGRLVLNTKEELANERLMTLKIAEMKEAMRTLIFPPSMHFFQAKHLIERSQVFNILRMMPKGAALHLHDIGIVTMDWLVRNVTYRPHCHICFTPRGIMQFRFAHPTPRPSEKCSKWILLEDYRKRVQNVTEFDDSLLRNFTLVTQHPEVIYTNQNVVWSKFETIFFTISGLIHYAPVFRDYVFRSMQEFYEDNVLYMEIRARLLPVYELSGEHHDEEWSVKTYQEVAQKFVETHPEFIGIKIIYADHRSKDVAVIAESIRMAMGLRIKFPTVVAGFDLVGHEDTGHSLHDYKEALMIPAKDGVKLPYFFHAGETDWQGTSIDRNILDALMLNTTRIGHGFALSKHPAVRTYSWKKDIPIEVCPISNQVLKLVSDLRNHPVATLMATGHPMVISSDDPAMFGAKGLSYDFYEVFMGIGGMKADLRTLKQLAMNSIKYSTLLESEKNTFMEIWKKRWDKFIADVATK

SEQ ID NO: 52 - protein, 482 aa, synthetic construct
  REGION 1..482: note = human ADA2 S262V, mature numbering
IDETRAHLLLKEKMMRLGGRLVLNTKEELANERLMTLKIAEMKEAMRTLIFPPSMHFFQAKHLIERSQVFNILRMMPKGAALHLHDIGIVTMDWLVRNVTYRPHCHICFTPRGIMQFRFAHPTPRPSEKCSKWILLEDYRKRVQNVTEFDDSLLRNFTLVTQHPEVIYTNQNVVWSKFETIFFTISGLIHYAPVFRDYVFRSMQEFYEDNVLYMEIRARLLPVYELSGEHHDEEWSVKTYQEVAQKFVETHPEFIGIKIIYVDHRSKDVAVIAESIRMAMGLRIKFPTVVAGFDLVGHEDTGHSLHDYKEALMIPAKDGVKLPYFFHAGETDWQGTSIDRNILDALMLNTTRIGHGFALSKHPAVRTYSWKKDIPIEVCPISNQVLKLVSDLRNHPVATLMATGHPMVISSDDPAMFGAKGLSYDFYEVFMGIGGMKADLRTLKQLAMNSIKYSTLLESEKNTFMEIWKKRWDKFIADVATK

SEQ ID NO: 53 - protein, 482 aa, synthetic construct
  REGION 1..482: note = human ADA2 S262M, mature numbering
IDETRAHLLLKEKMMRLGGRLVLNTKEELANERLMTLKIAEMKEAMRTLIFPPSMHFFQAKHLIERSQVFNILRMMPKGAALHLHDIGIVTMDWLVRNVTYRPHCHICFTPRGIMQFRFAHPTPRPSEKCSKWILLEDYRKRVQNVTEFDDSLLRNFTLVTQHPEVIYTNQNVVWSKFETIFFTISGLIHYAPVFRDYVFRSMQEFYEDNVLYMEIRARLLPVYELSGEHHDEEWSVKTYQEVAQKFVETHPEFIGIKIIYMDHRSKDVAVIAESIRMAMGLRIKFPTVVAGFDLVGHEDTGHSLHDYKEALMIPAKDGVKLPYFFHAGETDWQGTSIDRNILDALMLNTTRIGHGFALSKHPAVRTYSWKKDIPIEVCPISNQVLKLVSDLRNHPVATLMATGHPMVISSDDPAMFGAKGLSYDFYEVFMGIGGMKADLRTLKQLAMNSIKYSTLLESEKNTFMEIWKKRWDKFIADVATK

SEQ ID NO: 54 - protein, 482 aa, synthetic construct
  REGION 1..482: note = human ADA2 S262N, mature numbering
IDETRAHLLLKEKMMRLGGRLVLNTKEELANERLMTLKIAEMKEAMRTLIFPPSMHFFQAKHLIERSQVFNILRMMPKGAALHLHDIGIVTMDWLVRNVTYRPHCHICFTPRGIMQFRFAHPTPRPSEKCSKWILLEDYRKRVQNVTEFDDSLLRNFTLVTQHPEVIYTNQNVVWSKFETIFFTISGLIHYAPVFRDYVFRSMQEFYEDNVLYMEIRARLLPVYELSGEHHDEEWSVKTYQEVAQKFVETHPEFIGIKIIYNDHRSKDVAVIAESIRMAMGLRIKFPTVVAGFDLVGHEDTGHSLHDYKEALMIPAKDGVKLPYFFHAGETDWQGTSIDRNILDALMLNTTRIGHGFALSKHPAVRTYSWKKDIPIEVCPISNQVLKLVSDLRNHPVATLMATGHPMVISSDDPAMFGAKGLSYDFYEVFMGIGGMKADLRTLKQLAMNSIKYSTLLESEKNTFMEIWKKRWDKFIADVATK

SEQ ID NO: 55 - protein, 482 aa, synthetic construct
  REGION 1..482: note = human ADA2 K11A/R20A, mature numbering
IDETRAHLLLAEKMMRLGGALVLNTKEELANERLMTLKIAEMKEAMRTLIFPPSMHFFQAKHLIERSQVFNILRMMPKGAALHLHDIGIVTMDWLVRNVTYRPHCHICFTPRGIMQFRFAHPTPRPSEKCSKWILLEDYRKRVQNVTEFDDSLLRNFTLVTQHPEVIYTNQNVVWSKFETIFFTISGLIHYAPVFRDYVFRSMQEFYEDNVLYMEIRARLLPVYELSGEHHDEEWSVKTYQEVAQKFVETHPEFIGIKIIYSDHRSKDVAVIAESIRMAMGLRIKFPTVVAGFDLVGHEDTGHSLHDYKEALMIPAKDGVKLPYFFHAGETDWQGTSIDRNILDALMLNTTRIGHGFALSKHPAVRTYSWKKDIPIEVCPISNQVLKLVSDLRNHPVATLMATGHPMVISSDDPAMFGAKGLSYDFYEVFMGIGGMKADLRTLKQLAMNSIKYSTLLESEKNTFMEIWKKRWDKFIADVATK

SEQ ID NO: 56 - protein, 482 aa, synthetic construct
  REGION 1..482: note = human ADA2 K11A/R20A/K371A, mature numbering
IDETRAHLLLAEKMMRLGGALVLNTKEELANERLMTLKIAEMKEAMRTLIFPPSMHFFQAKHLIERSQVFNILRMMPKGAALHLHDIGIVTMDWLVRNVTYRPHCHICFTPRGIMQFRFAHPTPRPSEKCSKWILLEDYRKRVQNVTEFDDSLLRNFTLVTQHPEVIYTNQNVVWSKFETIFFTISGLIHYAPVFRDYVFRSMQEFYEDNVLYMEIRARLLPVYELSGEHHDEEWSVKTYQEVAQKFVETHPEFIGIKIIYSDHRSKDVAVIAESIRMAMGLRIKFPTVVAGFDLVGHEDTGHSLHDYKEALMIPAKDGVKLPYFFHAGETDWQGTSIDRNILDALMLNTTRIGHGFALSKHPAVRTYSWAKDIPIEVCPISNQVLKLVSDLRNHPVATLMATGHPMVISSDDPAMFGAKGLSYDFYEVFMGIGGMKADLRTLKQLAMNSIKYSTLLESEKNTFMEIWKKRWDKFIADVATK

SEQ ID NO: 57 - protein, 482 aa, synthetic construct
  REGION 1..482: note = human ADA2 R20A/K371A, mature numbering
IDETRAHLLLKEKMMRLGGALVLNTKEELANERLMTLKIAEMKEAMRTLIFPPSMHFFQAKHLIERSQVFNILRMMPKGAALHLHDIGIVTMDWLVRNVTYRPHCHICFTPRGIMQFRFAHPTPRPSEKCSKWILLEDYRKRVQNVTEFDDSLLRNFTLVTQHPEVIYTNQNVVWSKFETIFFTISGLIHYAPVFRDYVFRSMQEFYEDNVLYMEIRARLLPVYELSGEHHDEEWSVKTYQEVAQKFVETHPEFIGIKIIYSDHRSKDVAVIAESIRMAMGLRIKFPTVVAGFDLVGHEDTGHSLHDYKEALMIPAKDGVKLPYFFHAGETDWQGTSIDRNILDALMLNTTRIGHGFALSKHPAVRTYSWAKDIPIEVCPISNQVLKLVSDLRNHPVATLMATGHPMVISSDDPAMFGAKGLSYDFYEVFMGIGGMKADLRTLKQLAMNSIKYSTLLESEKNTFMEIWKKRWDKFIADVATK

SEQ ID NO: 58 - protein, 482 aa, synthetic construct
  REGION 1..482: note = human ADA2 K11A/K371A, mature numbering
IDETRAHLLLAEKMMRLGGRLVLNTKEELANERLMTLKIAEMKEAMRTLIFPPSMHFFQAKHLIERSQVFNILRMMPKGAALHLHDIGIVTMDWLVRNVTYRPHCHICFTPRGIMQFRFAHPTPRPSEKCSKWILLEDYRKRVQNVTEFDDSLLRNFTLVTQHPEVIYTNQNVVWSKFETIFFTISGLIHYAPVFRDYVFRSMQEFYEDNVLYMEIRARLLPVYELSGEHHDEEWSVKTYQEVAQKFVETHPEFIGIKIIYSDHRSKDVAVIAESIRMAMGLRIKFPTVVAGFDLVGHEDTGHSLHDYKEALMIPAKDGVKLPYFFHAGETDWQGTSIDRNILDALMLNTTRIGHGFALSKHPAVRTYSWAKDIPIEVCPISNQVLKLVSDLRNHPVATLMATGHPMVISSDDPAMFGAKGLSYDFYEVFMGIGGMKADLRTLKQLAMNSIKYSTLLESEKNTFMEIWKKRWDKFIADVATK

SEQ ID NO: 59 - protein, 482 aa, synthetic construct
  REGION 1..482: note = human ADA2 S262N/K371D, mature numbering
IDETRAHLLLKEKMMRLGGRLVLNTKEELANERLMTLKIAEMKEAMRTLIFPPSMHFFQAKHLIERSQVFNILRMMPKGAALHLHDIGIVTMDWLVRNVTYRPHCHICFTPRGIMQFRFAHPTPRPSEKCSKWILLEDYRKRVQNVTEFDDSLLRNFTLVTQHPEVIYTNQNVVWSKFETIFFTISGLIHYAPVFRDYVFRSMQEFYEDNVLYMEIRARLLPVYELSGEHHDEEWSVKTYQEVAQKFVETHPEFIGIKIIYNDHRSKDVAVIAESIRMAMGLRIKFPTVVAGFDLVGHEDTGHSLHDYKEALMIPAKDGVKLPYFFHAGETDWQGTSIDRNILDALMLNTTRIGHGFALSKHPAVRTYSWDKDIPIEVCPISNQVLKLVSDLRNHPVATLMATGHPMVISSDDPAMFGAKGLSYDFYEVFMGIGGMKADLRTLKQLAMNSIKYSTLLESEKNTFMEIWKKRWDKFIADVATK

SEQ ID NO: 60 - protein, 482 aa, synthetic construct
  REGION 1..482: note = human ADA2 S262N/K371E, mature numbering
IDETRAHLLLKEKMMRLGGRLVLNTKEELANERLMTLKIAEMKEAMRTLIFPPSMHFFQAKHLIERSQVFNILRMMPKGAALHLHDIGIVTMDWLVRNVTYRPHCHICFTPRGIMQFRFAHPTPRPSEKCSKWILLEDYRKRVQNVTEFDDSLLRNFTLVTQHPEVIYTNQNVVWSKFETIFFTISGLIHYAPVFRDYVFRSMQEFYEDNVLYMEIRARLLPVYELSGEHHDEEWSVKTYQEVAQKFVETHPEFIGIKIIYNDHRSKDVAVIAESIRMAMGLRIKFPTVVAGFDLVGHEDTGHSLHDYKEALMIPAKDGVKLPYFFHAGETDWQGTSIDRNILDALMLNTTRIGHGFALSKHPAVRTYSWEKDIPIEVCPISNQVLKLVSDLRNHPVATLMATGHPMVISSDDPAMFGAKGLSYDFYEVFMGIGGMKADLRTLKQLAMNSIKYSTLLESEKNTFMEIWKKRWDKFIADVATK

SEQ ID NO: 61 - protein, 482 aa, synthetic construct
  REGION 1..482: note = human ADA2 S262N/R20E, mature numbering
IDETRAHLLLKEKMMRLGGELVLNTKEELANERLMTLKIAEMKEAMRTLIFPPSMHFFQAKHLIERSQVFNILRMMPKGAALHLHDIGIVTMDWLVRNVTYRPHCHICFTPRGIMQFRFAHPTPRPSEKCSKWILLEDYRKRVQNVTEFDDSLLRNFTLVTQHPEVIYTNQNVVWSKFETIFFTISGLIHYAPVFRDYVFRSMQEFYEDNVLYMEIRARLLPVYELSGEHHDEEWSVKTYQEVAQKFVETHPEFIGIKIIYNDHRSKDVAVIAESIRMAMGLRIKFPTVVAGFDLVGHEDTGHSLHDYKEALMIPAKDGVKLPYFFHAGETDWQGTSIDRNILDALMLNTTRIGHGFALSKHPAVRTYSWKKDIPIEVCPISNQVLKLVSDLRNHPVATLMATGHPMVISSDDPAMFGAKGLSYDFYEVFMGIGGMKADLRTLKQLAMNSIKYSTLLESEKNTFMEIWKKRWDKFIADVATK

SEQ ID NO: 62 - protein, 482 aa, synthetic construct
  REGION 1..482: note = human ADA2 S262N/R20E/K371D, mature numbering
IDETRAHLLLKEKMMRLGGELVLNTKEELANERLMTLKIAEMKEAMRTLIFPPSMHFFQAKHLIERSQVFNILRMMPKGAALHLHDIGIVTMDWLVRNVTYRPHCHICFTPRGIMQFRFAHPTPRPSEKCSKWILLEDYRKRVQNVTEFDDSLLRNFTLVTQHPEVIYTNQNVVWSKFETIFFTISGLIHYAPVFRDYVFRSMQEFYEDNVLYMEIRARLLPVYELSGEHHDEEWSVKTYQEVAQKFVETHPEFIGIKIIYNDHRSKDVAVIAESIRMAMGLRIKFPTVVAGFDLVGHEDTGHSLHDYKEALMIPAKDGVKLPYFFHAGETDWQGTSIDRNILDALMLNTTRIGHGFALSKHPAVRTYSWDKDIPIEVCPISNQVLKLVSDLRNHPVATLMATGHPMVISSDDPAMFGAKGLSYDFYEVFMGIGGMKADLRTLKQLAMNSIKYSTLLESEKNTFMEIWKKRWDKFIADVATK

SEQ ID NO: 63 - protein, 482 aa, synthetic construct
  REGION 1..482: note = human ADA2 S262N/R20E/K371E, mature numbering
IDETRAHLLLKEKMMRLGGELVLNTKEELANERLMTLKIAEMKEAMRTLIFPPSMHFFQAKHLIERSQVFNILRMMPKGAALHLHDIGIVTMDWLVRNVTYRPHCHICFTPRGIMQFRFAHPTPRPSEKCSKWILLEDYRKRVQNVTEFDDSLLRNFTLVTQHPEVIYTNQNVVWSKFETIFFTISGLIHYAPVFRDYVFRSMQEFYEDNVLYMEIRARLLPVYELSGEHHDEEWSVKTYQEVAQKFVETHPEFIGIKIIYNDHRSKDVAVIAESIRMAMGLRIKFPTVVAGFDLVGHEDTGHSLHDYKEALMIPAKDGVKLPYFFHAGETDWQGTSIDRNILDALMLNTTRIGHGFALSKHPAVRTYSWEKDIPIEVCPISNQVLKLVSDLRNHPVATLMATGHPMVISSDDPAMFGAKGLSYDFYEVFMGIGGMKADLRTLKQLAMNSIKYSTLLESEKNTFMEIWKKRWDKFIADVATK

SEQ ID NO: 64 - protein, 5 aa, synthetic construct
  REGION 1..5: note = SGSGS Linker
SGSGS

SEQ ID NO: 65 - protein, 8 aa, synthetic construct
  REGION 1..8: note = Strep tag
WSHPQFEK

SEQ ID NO: 66 - protein, 362 aa, Homo sapiens
  REGION 1..362: note = mature ADA1 protein
AQTPAFDKPKVELHVHLDGSIKPETILYYGRRRGIALPANTAEGLLNVIGMDKPLTLPDFLAKFDYYMPAIAGCREAIKRIAYEFVEMKAKEGVVYVEVRYSPHLLANSKVEPIPWNQAEGDLTPDEVVALVGQGLQEGERDFGVKARSILCCMRHQPNWSPKVVELCKKYQQQTVVAIDLAGDETIPGSSLLPGHVQAYQEAVKSGIHRTVHAGEVGSAEVVKEAVDILKTERLGHGYHTLEDQALYNRLRQENMHFEICPWSSYLTGAWKPDTEHAVIRLKNDQANYSLNTDDPLIFKSTLDTDYQMTKRDMGFTEEEFKRLNINAAKSSFLPEDEKRELLDLLYKAYGMPPSASAGQNL

SEQ ID NO: 67 - protein, 375 aa, synthetic construct
  REGION 1..375: note = mature ADA1-linker-Strep
AQTPAFDKPKVELHVHLDGSIKPETILYYGRRRGIALPANTAEGLLNVIGMDKPLTLPDFLAKFDYYMPAIAGCREAIKRIAYEFVEMKAKEGVVYVEVRYSPHLLANSKVEPIPWNQAEGDLTPDEVVALVGQGLQEGERDFGVKARSILCCMRHQPNWSPKVVELCKKYQQQTVVAIDLAGDETIPGSSLLPGHVQAYQEAVKSGIHRTVHAGEVGSAEVVKEAVDILKTERLGHGYHTLEDQALYNRLRQENMHFEICPWSSYLTGAWKPDTEHAVIRLKNDQANYSLNTDDPLIFKSTLDTDYQMTKRDMGFTEEEFKRLNINAAKSSFLPEDEKRELLDLLYKAYGMPPSASAGQNLSGSGSWSHPQFEK

SEQ ID NO: 68 - protein, 270 aa, synthetic construct
  REGION 1..270: note = ADA2 protein isoform 2
MDSLEWNWALVYELSGEHHDEEWSVKTYQEVAQKFVETHPEFIGIKIIYSDHRSKDVAVIAESIRMAMGLRIKFPTVVAGFDLVGHEDTGHSLHDYKEALMIPAKDGVKLPYFFHAGETDWQGTSIDRNILDALMLNTTRIGHGFALSKHPAVRTYSWKKDIPIEVCPISNQVLKLVSDLRNHPVATLMATGHPMVISSDDPAMFGAKGLSYDFYEVFMGIGGMKADLRTLKQLAMNSIKYSTLLESEKNTFMEIWKKRWDKFIADVATK

SEQ ID NO: 69 - protein, 362 aa, synthetic construct
  REGION 1..362: note = mature ADA1 C74S
AQTPAFDKPKVELHVHLDGSIKPETILYYGRRRGIALPANTAEGLLNVIGMDKPLTLPDFLAKFDYYMPAIAGSREAIKRIAYEFVEMKAKEGVVYVEVRYSPHLLANSKVEPIPWNQAEGDLTPDEVVALVGQGLQEGERDFGVKARSILCCMRHQPNWSPKVVELCKKYQQQTVVAIDLAGDETIPGSSLLPGHVQAYQEAVKSGIHRTVHAGEVGSAEVVKEAVDILKTERLGHGYHTLEDQALYNRLRQENMHFEICPWSSYLTGAWKPDTEHAVIRLKNDQANYSLNTDDPLIFKSTLDTDYQMTKRDMGFTEEEFKRLNINAAKSSFLPEDEKRELLDLLYKAYGMPPSASAGQNL

SEQ ID NO: 70 - protein, 375 aa, synthetic construct
  REGION 1..375: note = mature ADA1-linker-Strep
AQTPAFDKPKVELHVHLDGSIKPETILYYGRRRGIALPANTAEGLLNVIGMDKPLTLPDFLAKFDYYMPAIAGSREAIKRIAYEFVEMKAKEGVVYVEVRYSPHLLANSKVEPIPWNQAEGDLTPDEVVALVGQGLQEGERDFGVKARSILCCMRHQPNWSPKVVELCKKYQQQTVVAIDLAGDETIPGSSLLPGHVQAYQEAVKSGIHRTVHAGEVGSAEVVKEAVDILKTERLGHGYHTLEDQALYNRLRQENMHFEICPWSSYLTGAWKPDTEHAVIRLKNDQANYSLNTDDPLIFKSTLDTDYQMTKRDMGFTEEEFKRLNINAAKSSFLPEDEKRELLDLLYKAYGMPPSASAGQNLSGSGSWSHPQFEK

SEQ ID NO: 71 - protein, 482 aa, synthetic construct
  REGION 1..482: note = human ADA2 K26A, mature numbering
IDETRAHLLLKEKMMRLGGRLVLNTAEELANERLMTLKIAEMKEAMRTLIFPPSMHFFQAKHLIERSQVFNILRMMPKGAALHLHDIGIVTMDWLVRNVTYRPHCHICFTPRGIMQFRFAHPTPRPSEKCSKWILLEDYRKRVQNVTEFDDSLLRNFTLVTQHPEVIYTNQNVVWSKFETIFFTISGLIHYAPVFRDYVFRSMQEFYEDNVLYMEIRARLLPVYELSGEHHDEEWSVKTYQEVAQKFVETHPEFIGIKIIYSDHRSKDVAVIAESIRMAMGLRIKFPTVVAGFDLVGHEDTGHSLHDYKEALMIPAKDGVKLPYFFHAGETDWQGTSIDRNILDALMLNTTRIGHGFALSKHPAVRTYSWKKDIPIEVCPISNQVLKLVSDLRNHPVATLMATGHPMVISSDDPAMFGAKGLSYDFYEVFMGIGGMKADLRTLKQLAMNSIKYSTLLESEKNTFMEIWKKRWDKFIADVATK

SEQ ID NO: 72 - protein, 482 aa, synthetic construct
  REGION 1..482: note = human ADA2 K26D, mature numbering
IDETRAHLLLKEKMMRLGGRLVLNTDEELANERLMTLKIAEMKEAMRTLIFPPSMHFFQAKHLIERSQVFNILRMMPKGAALHLHDIGIVTMDWLVRNVTYRPHCHICFTPRGIMQFRFAHPTPRPSEKCSKWILLEDYRKRVQNVTEFDDSLLRNFTLVTQHPEVIYTNQNVVWSKFETIFFTISGLIHYAPVFRDYVFRSMQEFYEDNVLYMEIRARLLPVYELSGEHHDEEWSVKTYQEVAQKFVETHPEFIGIKIIYSDHRSKDVAVIAESIRMAMGLRIKFPTVVAGFDLVGHEDTGHSLHDYKEALMIPAKDGVKLPYFFHAGETDWQGTSIDRNILDALMLNTTRIGHGFALSKHPAVRTYSWKKDIPIEVCPISNQVLKLVSDLRNHPVATLMATGHPMVISSDDPAMFGAKGLSYDFYEVFMGIGGMKADLRTLKQLAMNSIKYSTLLESEKNTFMEIWKKRWDKFIADVATK

SEQ ID NO: 73 - protein, 482 aa, synthetic construct
  REGION 1..482: note = human ADA2 K26E, mature numbering
IDETRAHLLLKEKMMRLGGRLVLNTEEELANERLMTLKIAEMKEAMRTLIFPPSMHFFQAKHLIERSQVFNILRMMPKGAALHLHDIGIVTMDWLVRNVTYRPHCHICFTPRGIMQFRFAHPTPRPSEKCSKWILLEDYRKRVQNVTEFDDSLLRNFTLVTQHPEVIYTNQNVVWSKFETIFFTISGLIHYAPVFRDYVFRSMQEFYEDNVLYMEIRARLLPVYELSGEHHDEEWSVKTYQEVAQKFVETHPEFIGIKIIYSDHRSKDVAVIAESIRMAMGLRIKFPTVVAGFDLVGHEDTGHSLHDYKEALMIPAKDGVKLPYFFHAGETDWQGTSIDRNILDALMLNTTRIGHGFALSKHPAVRTYSWKKDIPIEVCPISNQVLKLVSDLRNHPVATLMATGHPMVISSDDPAMFGAKGLSYDFYEVFMGIGGMKADLRTLKQLAMNSIKYSTLLESEKNTFMEIWKKRWDKFIADVATK

SEQ ID NO: 74 - protein, 482 aa, synthetic construct
  REGION 1..482: note = human ADA2 R217A, mature numbering
IDETRAHLLLKEKMMRLGGRLVLNTKEELANERLMTLKIAEMKEAMRTLIFPPSMHFFQAKHLIERSQVFNILRMMPKGAALHLHDIGIVTMDWLVRNVTYRPHCHICFTPRGIMQFRFAHPTPRPSEKCSKWILLEDYRKRVQNVTEFDDSLLRNFTLVTQHPEVIYTNQNVVWSKFETIFFTISGLIHYAPVFRDYVFRSMQEFYEDNVLYMEIAARLLPVYELSGEHHDEEWSVKTYQEVAQKFVETHPEFIGIKIIYSDHRSKDVAVIAESIRMAMGLRIKFPTVVAGFDLVGHEDTGHSLHDYKEALMIPAKDGVKLPYFFHAGETDWQGTSIDRNILDALMLNTTRIGHGFALSKHPAVRTYSWKKDIPIEVCPISNQVLKLVSDLRNHPVATLMATGHPMVISSDDPAMFGAKGLSYDFYEVFMGIGGMKADLRTLKQLAMNSIKYSTLLESEKNTFMEIWKKRWDKFIADVATK

SEQ ID NO: 75 - protein, 482 aa, synthetic construct
  REGION 1..482: note = human ADA2 R217D, mature numbering
IDETRAHLLLKEKMMRLGGRLVLNTKEELANERLMTLKIAEMKEAMRTLIFPPSMHFFQAKHLIERSQVFNILRMMPKGAALHLHDIGIVTMDWLVRNVTYRPHCHICFTPRGIMQFRFAHPTPRPSEKCSKWILLEDYRKRVQNVTEFDDSLLRNFTLVTQHPEVIYTNQNVVWSKFETIFFTISGLIHYAPVFRDYVFRSMQEFYEDNVLYMEIDARLLPVYELSGEHHDEEWSVKTYQEVAQKFVETHPEFIGIKIIYSDHRSKDVAVIAESIRMAMGLRIKFPTVVAGFDLVGHEDTGHSLHDYKEALMIPAKDGVKLPYFFHAGETDWQGTSIDRNILDALMLNTTRIGHGFALSKHPAVRTYSWKKDIPIEVCPISNQVLKLVSDLRNHPVATLMATGHPMVISSDDPAMFGAKGLSYDFYEVFMGIGGMKADLRTLKQLAMNSIKYSTLLESEKNTFMEIWKKRWDKFIADVATK

SEQ ID NO: 76 - protein, 482 aa, synthetic construct
  REGION 1..482: note = human ADA2 R217E, mature numbering
IDETRAHLLLKEKMMRLGGRLVLNTKEELANERLMTLKIAEMKEAMRTLIFPPSMHFFQAKHLIERSQVFNILRMMPKGAALHLHDIGIVTMDWLVRNVTYRPHCHICFTPRGIMQFRFAHPTPRPSEKCSKWILLEDYRKRVQNVTEFDDSLLRNFTLVTQHPEVIYTNQNVVWSKFETIFFTISGLIHYAPVFRDYVFRSMQEFYEDNVLYMEIEARLLPVYELSGEHHDEEWSVKTYQEVAQKFVETHPEFIGIKIIYSDHRSKDVAVIAESIRMAMGLRIKFPTVVAGFDLVGHEDTGHSLHDYKEALMIPAKDGVKLPYFFHAGETDWQGTSIDRNILDALMLNTTRIGHGFALSKHPAVRTYSWKKDIPIEVCPISNQVLKLVSDLRNHPVATLMATGHPMVISSDDPAMFGAKGLSYDFYEVFMGIGGMKADLRTLKQLAMNSIKYSTLLESEKNTFMEIWKKRWDKFIADVATK

SEQ ID NO: 77 - protein, 482 aa, synthetic construct
  REGION 1..482: note = human ADA2 K258A, mature numbering
IDETRAHLLLKEKMMRLGGRLVLNTKEELANERLMTLKIAEMKEAMRTLIFPPSMHFFQAKHLIERSQVFNILRMMPKGAALHLHDIGIVTMDWLVRNVTYRPHCHICFTPRGIMQFRFAHPTPRPSEKCSKWILLEDYRKRVQNVTEFDDSLLRNFTLVTQHPEVIYTNQNVVWSKFETIFFTISGLIHYAPVFRDYVFRSMQEFYEDNVLYMEIRARLLPVYELSGEHHDEEWSVKTYQEVAQKFVETHPEFIGIAIIYSDHRSKDVAVIAESIRMAMGLRIKFPTVVAGFDLVGHEDTGHSLHDYKEALMIPAKDGVKLPYFFHAGETDWQGTSIDRNILDALMLNTTRIGHGFALSKHPAVRTYSWKKDIPIEVCPISNQVLKLVSDLRNHPVATLMATGHPMVISSDDPAMFGAKGLSYDFYEVFMGIGGMKADLRTLKQLAMNSIKYSTLLESEKNTFMEIWKKRWDKFIADVATK

SEQ ID NO: 78 - protein, 482 aa, synthetic construct
  REGION 1..482: note = human ADA2 K258D, mature numbering
IDETRAHLLLKEKMMRLGGRLVLNTKEELANERLMTLKIAEMKEAMRTLIFPPSMHFFQAKHLIERSQVFNILRMMPKGAALHLHDIGIVTMDWLVRNVTYRPHCHICFTPRGIMQFRFAHPTPRPSEKCSKWILLEDYRKRVQNVTEFDDSLLRNFTLVTQHPEVIYTNQNVVWSKFETIFFTISGLIHYAPVFRDYVFRSMQEFYEDNVLYMEIRARLLPVYELSGEHHDEEWSVKTYQEVAQKFVETHPEFIGIDIIYSDHRSKDVAVIAESIRMAMGLRIKFPTVVAGFDLVGHEDTGHSLHDYKEALMIPAKDGVKLPYFFHAGETDWQGTSIDRNILDALMLNTTRIGHGFALSKHPAVRTYSWKKDIPIEVCPISNQVLKLVSDLRNHPVATLMATGHPMVISSDDPAMFGAKGLSYDFYEVFMGIGGMKADLRTLKQLAMNSIKYSTLLESEKNTFMEIWKKRWDKFIADVATK

SEQ ID NO: 79 - protein, 482 aa, synthetic construct
  REGION 1..482: note = human ADA2 K258E, mature numbering
IDETRAHLLLKEKMMRLGGRLVLNTKEELANERLMTLKIAEMKEAMRTLIFPPSMHFFQAKHLIERSQVFNILRMMPKGAALHLHDIGIVTMDWLVRNVTYRPHCHICFTPRGIMQFRFAHPTPRPSEKCSKWILLEDYRKRVQNVTEFDDSLLRNFTLVTQHPEVIYTNQNVVWSKFETIFFTISGLIHYAPVFRDYVFRSMQEFYEDNVLYMEIRARLLPVYELSGEHHDEEWSVKTYQEVAQKFVETHPEFIGIEIIYSDHRSKDVAVIAESIRMAMGLRIKFPTVVAGFDLVGHEDTGHSLHDYKEALMIPAKDGVKLPYFFHAGETDWQGTSIDRNILDALMLNTTRIGHGFALSKHPAVRTYSWKKDIPIEVCPISNQVLKLVSDLRNHPVATLMATGHPMVISSDDPAMFGAKGLSYDFYEVFMGIGGMKADLRTLKQLAMNSIKYSTLLESEKNTFMEIWKKRWDKFIADVATK

SEQ ID NO: 80 - protein, 482 aa, synthetic construct
  REGION 1..482: note = human ADA2 R277A, mature numbering
IDETRAHLLLKEKMMRLGGRLVLNTKEELANERLMTLKIAEMKEAMRTLIFPPSMHFFQAKHLIERSQVFNILRMMPKGAALHLHDIGIVTMDWLVRNVTYRPHCHICFTPRGIMQFRFAHPTPRPSEKCSKWILLEDYRKRVQNVTEFDDSLLRNFTLVTQHPEVIYTNQNVVWSKFETIFFTISGLIHYAPVFRDYVFRSMQEFYEDNVLYMEIRARLLPVYELSGEHHDEEWSVKTYQEVAQKFVETHPEFIGIKIIYSDHRSKDVAVIAESIAMAMGLRIKFPTVVAGFDLVGHEDTGHSLHDYKEALMIPAKDGVKLPYFFHAGETDWQGTSIDRNILDALMLNTTRIGHGFALSKHPAVRTYSWKKDIPIEVCPISNQVLKLVSDLRNHPVATLMATGHPMVISSDDPAMFGAKGLSYDFYEVFMGIGGMKADLRTLKQLAMNSIKYSTLLESEKNTFMEIWKKRWDKFIADVATK

SEQ ID NO: 81 - protein, 482 aa, synthetic construct
  REGION 1..482: note = human ADA2 R277D, mature numbering
IDETRAHLLLKEKMMRLGGRLVLNTKEELANERLMTLKIAEMKEAMRTLIFPPSMHFFQAKHLIERSQVFNILRMMPKGAALHLHDIGIVTMDWLVRNVTYRPHCHICFTPRGIMQFRFAHPTPRPSEKCSKWILLEDYRKRVQNVTEFDDSLLRNFTLVTQHPEVIYTNQNVVWSKFETIFFTISGLIHYAPVFRDYVFRSMQEFYEDNVLYMEIRARLLPVYELSGEHHDEEWSVKTYQEVAQKFVETHPEFIGIKIIYSDHRSKDVAVIAESIDMAMGLRIKFPTVVAGFDLVGHEDTGHSLHDYKEALMIPAKDGVKLPYFFHAGETDWQGTSIDRNILDALMLNTTRIGHGFALSKHPAVRTYSWKKDIPIEVCPISNQVLKLVSDLRNHPVATLMATGHPMVISSDDPAMFGAKGLSYDFYEVFMGIGGMKADLRTLKQLAMNSIKYSTLLESEKNTFMEIWKKRWDKFIADVATK

SEQ ID NO: 82 - protein, 482 aa, synthetic construct
  REGION 1..482: note = human ADA2 R277E, mature numbering
IDETRAHLLLKEKMMRLGGRLVLNTKEELANERLMTLKIAEMKEAMRTLIFPPSMHFFQAKHLIERSQVFNILRMMPKGAALHLHDIGIVTMDWLVRNVTYRPHCHICFTPRGIMQFRFAHPTPRPSEKCSKWILLEDYRKRVQNVTEFDDSLLRNFTLVTQHPEVIYTNQNVVWSKFETIFFTISGLIHYAPVFRDYVFRSMQEFYEDNVLYMEIRARLLPVYELSGEHHDEEWSVKTYQEVAQKFVETHPEFIGIKIIYSDHRSKDVAVIAESIEMAMGLRIKFPTVVAGFDLVGHEDTGHSLHDYKEALMIPAKDGVKLPYFFHAGETDWQGTSIDRNILDALMLNTTRIGHGFALSKHPAVRTYSWKKDIPIEVCPISNQVLKLVSDLRNHPVATLMATGHPMVISSDDPAMFGAKGLSYDFYEVFMGIGGMKADLRTLKQLAMNSIKYSTLLESEKNTFMEIWKKRWDKFIADVATK

SEQ ID NO: 83 - protein, 482 aa, synthetic construct
  REGION 1..482: note = human ADA2 R283A, mature numbering
IDETRAHLLLKEKMMRLGGRLVLNTKEELANERLMTLKIAEMKEAMRTLIFPPSMHFFQAKHLIERSQVFNILRMMPKGAALHLHDIGIVTMDWLVRNVTYRPHCHICFTPRGIMQFRFAHPTPRPSEKCSKWILLEDYRKRVQNVTEFDDSLLRNFTLVTQHPEVIYTNQNVVWSKFETIFFTISGLIHYAPVFRDYVFRSMQEFYEDNVLYMEIRARLLPVYELSGEHHDEEWSVKTYQEVAQKFVETHPEFIGIKIIYSDHRSKDVAVIAESIRMAMGLAIKFPTVVAGFDLVGHEDTGHSLHDYKEALMIPAKDGVKLPYFFHAGETDWQGTSIDRNILDALMLNTTRIGHGFALSKHPAVRTYSWKKDIPIEVCPISNQVLKLVSDLRNHPVATLMATGHPMVISSDDPAMFGAKGLSYDFYEVFMGIGGMKADLRTLKQLAMNSIKYSTLLESEKNTFMEIWKKRWDKFIADVATK

SEQ ID NO: 84 - protein, 482 aa, synthetic construct
  REGION 1..482: note = human ADA2 R283D, mature numbering
IDETRAHLLLKEKMMRLGGRLVLNTKEELANERLMTLKIAEMKEAMRTLIFPPSMHFFQAKHLIERSQVFNILRMMPKGAALHLHDIGIVTMDWLVRNVTYRPHCHICFTPRGIMQFRFAHPTPRPSEKCSKWILLEDYRKRVQNVTEFDDSLLRNFTLVTQHPEVIYTNQNVVWSKFETIFFTISGLIHYAPVFRDYVFRSMQEFYEDNVLYMEIRARLLPVYELSGEHHDEEWSVKTYQEVAQKFVETHPEFIGIKIIYSDHRSKDVAVIAESIRMAMGLDIKFPTVVAGFDLVGHEDTGHSLHDYKEALMIPAKDGVKLPYFFHAGETDWQGTSIDRNILDALMLNTTRIGHGFALSKHPAVRTYSWKKDIPIEVCPISNQVLKLVSDLRNHPVATLMATGHPMVISSDDPAMFGAKGLSYDFYEVFMGIGGMKADLRTLKQLAMNSIKYSTLLESEKNTFMEIWKKRWDKFIADVATK

SEQ ID NO: 85 - protein, 482 aa, synthetic construct
  REGION 1..482: note = human ADA2 R283E, mature numbering
IDETRAHLLLKEKMMRLGGRLVLNTKEELANERLMTLKIAEMKEAMRTLIFPPSMHFFQAKHLIERSQVFNILRMMPKGAALHLHDIGIVTMDWLVRNVTYRPHCHICFTPRGIMQFRFAHPTPRPSEKCSKWILLEDYRKRVQNVTEFDDSLLRNFTLVTQHPEVIYTNQNVVWSKFETIFFTISGLIHYAPVFRDYVFRSMQEFYEDNVLYMEIRARLLPVYELSGEHHDEEWSVKTYQEVAQKFVETHPEFIGIKIIYSDHRSKDVAVIAESIRMAMGLEIKFPTVVAGFDLVGHEDTGHSLHDYKEALMIPAKDGVKLPYFFHAGETDWQGTSIDRNILDALMLNTTRIGHGFALSKHPAVRTYSWKKDIPIEVCPISNQVLKLVSDLRNHPVATLMATGHPMVISSDDPAMFGAKGLSYDFYEVFMGIGGMKADLRTLKQLAMNSIKYSTLLESEKNTFMEIWKKRWDKFIADVATK

SEQ ID NO: 86 - protein, 482 aa, synthetic construct
  REGION 1..482: note = human ADA2 K309A, mature numbering
IDETRAHLLLKEKMMRLGGRLVLNTKEELANERLMTLKIAEMKEAMRTLIFPPSMHFFQAKHLIERSQVFNILRMMPKGAALHLHDIGIVTMDWLVRNVTYRPHCHICFTPRGIMQFRFAHPTPRPSEKCSKWILLEDYRKRVQNVTEFDDSLLRNFTLVTQHPEVIYTNQNVVWSKFETIFFTISGLIHYAPVFRDYVFRSMQEFYEDNVLYMEIRARLLPVYELSGEHHDEEWSVKTYQEVAQKFVETHPEFIGIKIIYSDHRSKDVAVIAESIRMAMGLRIKFPTVVAGFDLVGHEDTGHSLHDYAEALMIPAKDGVKLPYFFHAGETDWQGTSIDRNILDALMLNTTRIGHGFALSKHPAVRTYSWKKDIPIEVCPISNQVLKLVSDLRNHPVATLMATGHPMVISSDDPAMFGAKGLSYDFYEVFMGIGGMKADLRTLKQLAMNSIKYSTLLESEKNTFMEIWKKRWDKFIADVATK

SEQ ID NO: 87 - protein, 482 aa, synthetic construct
  REGION 1..482: note = human ADA2 K309D, mature numbering
IDETRAHLLLKEKMMRLGGRLVLNTKEELANERLMTLKIAEMKEAMRTLIFPPSMHFFQAKHLIERSQVFNILRMMPKGAALHLHDIGIVTMDWLVRNVTYRPHCHICFTPRGIMQFRFAHPTPRPSEKCSKWILLEDYRKRVQNVTEFDDSLLRNFTLVTQHPEVIYTNQNVVWSKFETIFFTISGLIHYAPVFRDYVFRSMQEFYEDNVLYMEIRARLLPVYELSGEHHDEEWSVKTYQEVAQKFVETHPEFIGIKIIYSDHRSKDVAVIAESIRMAMGLRIKFPTVVAGFDLVGHEDTGHSLHDYDEALMIPAKDGVKLPYFFHAGETDWQGTSIDRNILDALMLNTTRIGHGFALSKHPAVRTYSWKKDIPIEVCPISNQVLKLVSDLRNHPVATLMATGHPMVISSDDPAMFGAKGLSYDFYEVFMGIGGMKADLRTLKQLAMNSIKYSTLLESEKNTFMEIWKKRWDKFIADVATK

SEQ ID NO: 88 - protein, 482 aa, synthetic construct
  REGION 1..482: note = human ADA2 K309E, mature numbering
IDETRAHLLLKEKMMRLGGRLVLNTKEELANERLMTLKIAEMKEAMRTLIFPPSMHFFQAKHLIERSQVFNILRMMPKGAALHLHDIGIVTMDWLVRNVTYRPHCHICFTPRGIMQFRFAHPTPRPSEKCSKWILLEDYRKRVQNVTEFDDSLLRNFTLVTQHPEVIYTNQNVVWSKFETIFFTISGLIHYAPVFRDYVFRSMQEFYEDNVLYMEIRARLLPVYELSGEHHDEEWSVKTYQEVAQKFVETHPEFIGIKIIYSDHRSKDVAVIAESIRMAMGLRIKFPTVVAGFDLVGHEDTGHSLHDYEEALMIPAKDGVKLPYFFHAGETDWQGTSIDRNILDALMLNTTRIGHGFALSKHPAVRTYSWKKDIPIEVCPISNQVLKLVSDLRNHPVATLMATGHPMVISSDDPAMFGAKGLSYDFYEVFMGIGGMKADLRTLKQLAMNSIKYSTLLESEKNTFMEIWKKRWDKFIADVATK

SEQ ID NO: 89 - protein, 482 aa, synthetic construct
  REGION 1..482: note = human ADA2 K317A, mature numbering
IDETRAHLLLKEKMMRLGGRLVLNTKEELANERLMTLKIAEMKEAMRTLIFPPSMHFFQAKHLIERSQVFNILRMMPKGAALHLHDIGIVTMDWLVRNVTYRPHCHICFTPRGIMQFRFAHPTPRPSEKCSKWILLEDYRKRVQNVTEFDDSLLRNFTLVTQHPEVIYTNQNVVWSKFETIFFTISGLIHYAPVFRDYVFRSMQEFYEDNVLYMEIRARLLPVYELSGEHHDEEWSVKTYQEVAQKFVETHPEFIGIKIIYSDHRSKDVAVIAESIRMAMGLRIKFPTVVAGFDLVGHEDTGHSLHDYKEALMIPAADGVKLPYFFHAGETDWQGTSIDRNILDALMLNTTRIGHGFALSKHPAVRTYSWKKDIPIEVCPISNQVLKLVSDLRNHPVATLMATGHPMVISSDDPAMFGAKGLSYDFYEVFMGIGGMKADLRTLKQLAMNSIKYSTLLESEKNTFMEIWKKRWDKFIADVATK

SEQ ID NO: 90 - protein, 482 aa, synthetic construct
  REGION 1..482: note = human ADA2 K317D, mature numbering
IDETRAHLLLKEKMMRLGGRLVLNTKEELANERLMTLKIAEMKEAMRTLIFPPSMHFFQAKHLIERSQVFNILRMMPKGAALHLHDIGIVTMDWLVRNVTYRPHCHICFTPRGIMQFRFAHPTPRPSEKCSKWILLEDYRKRVQNVTEFDDSLLRNFTLVTQHPEVIYTNQNVVWSKFETIFFTISGLIHYAPVFRDYVFRSMQEFYEDNVLYMEIRARLLPVYELSGEHHDEEWSVKTYQEVAQKFVETHPEFIGIKIIYSDHRSKDVAVIAESIRMAMGLRIKFPTVVAGFDLVGHEDTGHSLHDYKEALMIPADDGVKLPYFFHAGETDWQGTSIDRNILDALMLNTTRIGHGFALSKHPAVRTYSWKKDIPIEVCPISNQVLKLVSDLRNHPVATLMATGHPMVISSDDPAMFGAKGLSYDFYEVFMGIGGMKADLRTLKQLAMNSIKYSTLLESEKNTFMEIWKKRWDKFIADVATK

SEQ ID NO: 91 - protein, 482 aa, synthetic construct
  REGION 1..482: note = human ADA2 K317E, mature numbering
IDETRAHLLLKEKMMRLGGRLVLNTKEELANERLMTLKIAEMKEAMRTLIFPPSMHFFQAKHLIERSQVFNILRMMPKGAALHLHDIGIVTMDWLVRNVTYRPHCHICFTPRGIMQFRFAHPTPRPSEKCSKWILLEDYRKRVQNVTEFDDSLLRNFTLVTQHPEVIYTNQNVVWSKFETIFFTISGLIHYAPVFRDYVFRSMQEFYEDNVLYMEIRARLLPVYELSGEHHDEEWSVKTYQEVAQKFVETHPEFIGIKIIYSDHRSKDVAVIAESIRMAMGLRIKFPTVVAGFDLVGHEDTGHSLHDYKEALMIPAEDGVKLPYFFHAGETDWQGTSIDRNILDALMLNTTRIGHGFALSKHPAVRTYSWKKDIPIEVCPISNQVLKLVSDLRNHPVATLMATGHPMVISSDDPAMFGAKGLSYDFYEVFMGIGGMKADLRTLKQLAMNSIKYSTLLESEKNTFMEIWKKRWDKFIADVATK

SEQ ID NO: 92 - protein, 482 aa, synthetic construct
  REGION 1..482: note = human ADA2 K321A, mature numbering
IDETRAHLLLKEKMMRLGGRLVLNTKEELANERLMTLKIAEMKEAMRTLIFPPSMHFFQAKHLIERSQVFNILRMMPKGAALHLHDIGIVTMDWLVRNVTYRPHCHICFTPRGIMQFRFAHPTPRPSEKCSKWILLEDYRKRVQNVTEFDDSLLRNFTLVTQHPEVIYTNQNVVWSKFETIFFTISGLIHYAPVFRDYVFRSMQEFYEDNVLYMEIRARLLPVYELSGEHHDEEWSVKTYQEVAQKFVETHPEFIGIKIIYSDHRSKDVAVIAESIRMAMGLRIKFPTVVAGFDLVGHEDTGHSLHDYKEALMIPAKDGVALPYFFHAGETDWQGTSIDRNILDALMLNTTRIGHGFALSKHPAVRTYSWKKDIPIEVCPISNQVLKLVSDLRNHPVATLMATGHPMVISSDDPAMFGAKGLSYDFYEVFMGIGGMKADLRTLKQLAMNSIKYSTLLESEKNTFMEIWKKRWDKFIADVATK

SEQ ID NO: 93 - protein, 482 aa, synthetic construct
  REGION 1..482: note = human ADA2 K321D, mature numbering
IDETRAHLLLKEKMMRLGGRLVLNTKEELANERLMTLKIAEMKEAMRTLIFPPSMHFFQAKHLIERSQVFNILRMMPKGAALHLHDIGIVTMDWLVRNVTYRPHCHICFTPRGIMQFRFAHPTPRPSEKCSKWILLEDYRKRVQNVTEFDDSLLRNFTLVTQHPEVIYTNQNVVWSKFETIFFTISGLIHYAPVFRDYVFRSMQEFYEDNVLYMEIRARLLPVYELSGEHHDEEWSVKTYQEVAQKFVETHPEFIGIKIIYSDHRSKDVAVIAESIRMAMGLRIKFPTVVAGFDLVGHEDTGHSLHDYKEALMIPAKDGVDLPYFFHAGETDWQGTSIDRNILDALMLNTTRIGHGFALSKHPAVRTYSWKKDIPIEVCPISNQVLKLVSDLRNHPVATLMATGHPMVISSDDPAMFGAKGLSYDFYEVFMGIGGMKADLRTLKQLAMNSIKYSTLLESEKNTFMEIWKKRWDKFIADVATK

SEQ ID NO: 94 - protein, 482 aa, synthetic construct
  REGION 1..482: note = human ADA2 K321E, mature numbering
IDETRAHLLLKEKMMRLGGRLVLNTKEELANERLMTLKIAEMKEAMRTLIFPPSMHFFQAKHLIERSQVFNILRMMPKGAALHLHDIGIVTMDWLVRNVTYRPHCHICFTPRGIMQFRFAHPTPRPSEKCSKWILLEDYRKRVQNVTEFDDSLLRNFTLVTQHPEVIYTNQNVVWSKFETIFFTISGLIHYAPVFRDYVFRSMQEFYEDNVLYMEIRARLLPVYELSGEHHDEEWSVKTYQEVAQKFVETHPEFIGIKIIYSDHRSKDVAVIAESIRMAMGLRIKFPTVVAGFDLVGHEDTGHSLHDYKEALMIPAKDGVELPYFFHAGETDWQGTSIDRNILDALMLNTTRIGHGFALSKHPAVRTYSWKKDIPIEVCPISNQVLKLVSDLRNHPVATLMATGHPMVISSDDPAMFGAKGLSYDFYEVFMGIGGMKADLRTLKQLAMNSIKYSTLLESEKNTFMEIWKKRWDKFIADVATK

SEQ ID NO: 95 - protein, 482 aa, synthetic construct
  REGION 1..482: note = human ADA2 R352A, mature numbering
IDETRAHLLLKEKMMRLGGRLVLNTKEELANERLMTLKIAEMKEAMRTLIFPPSMHFFQAKHLIERSQVFNILRMMPKGAALHLHDIGIVTMDWLVRNVTYRPHCHICFTPRGIMQFRFAHPTPRPSEKCSKWILLEDYRKRVQNVTEFDDSLLRNFTLVTQHPEVIYTNQNVVWSKFETIFFTISGLIHYAPVFRDYVFRSMQEFYEDNVLYMEIRARLLPVYELSGEHHDEEWSVKTYQEVAQKFVETHPEFIGIKIIYSDHRSKDVAVIAESIRMAMGLRIKFPTVVAGFDLVGHEDTGHSLHDYKEALMIPAKDGVKLPYFFHAGETDWQGTSIDRNILDALMLNTTAIGHGFALSKHPAVRTYSWKKDIPIEVCPISNQVLKLVSDLRNHPVATLMATGHPMVISSDDPAMFGAKGLSYDFYEVFMGIGGMKADLRTLKQLAMNSIKYSTLLESEKNTFMEIWKKRWDKFIADVATK

SEQ ID NO: 96 - protein, 482 aa, synthetic construct
  REGION 1..482: note = human ADA2 R352D, mature numbering
IDETRAHLLLKEKMMRLGGRLVLNTKEELANERLMTLKIAEMKEAMRTLIFPPSMHFFQAKHLIERSQVFNILRMMPKGAALHLHDIGIVTMDWLVRNVTYRPHCHICFTPRGIMQFRFAHPTPRPSEKCSKWILLEDYRKRVQNVTEFDDSLLRNFTLVTQHPEVIYTNQNVVWSKFETIFFTISGLIHYAPVFRDYVFRSMQEFYEDNVLYMEIRARLLPVYELSGEHHDEEWSVKTYQEVAQKFVETHPEFIGIKIIYSDHRSKDVAVIAESIRMAMGLRIKFPTVVAGFDLVGHEDTGHSLHDYKEALMIPAKDGVKLPYFFHAGETDWQGTSIDRNILDALMLNTTDIGHGFALSKHPAVRTYSWKKDIPIEVCPISNQVLKLVSDLRNHPVATLMATGHPMVISSDDPAMFGAKGLSYDFYEVFMGIGGMKADLRTLKQLAMNSIKYSTLLESEKNTFMEIWKKRWDKFIADVATK

SEQ ID NO: 97 - protein, 482 aa, synthetic construct
  REGION 1..482: note = human ADA2 R352E, mature numbering
IDETRAHLLLKEKMMRLGGRLVLNTKEELANERLMTLKIAEMKEAMRTLIFPPSMHFFQAKHLIERSQVFNILRMMPKGAALHLHDIGIVTMDWLVRNVTYRPHCHICFTPRGIMQFRFAHPTPRPSEKCSKWILLEDYRKRVQNVTEFDDSLLRNFTLVTQHPEVIYTNQNVVWSKFETIFFTISGLIHYAPVFRDYVFRSMQEFYEDNVLYMEIRARLLPVYELSGEHHDEEWSVKTYQEVAQKFVETHPEFIGIKIIYSDHRSKDVAVIAESIRMAMGLRIKFPTVVAGFDLVGHEDTGHSLHDYKEALMIPAKDGVKLPYFFHAGETDWQGTSIDRNILDALMLNTTEIGHGFALSKHPAVRTYSWKKDIPIEVCPISNQVLKLVSDLRNHPVATLMATGHPMVISSDDPAMFGAKGLSYDFYEVFMGIGGMKADLRTLKQLAMNSIKYSTLLESEKNTFMEIWKKRWDKFIADVATK

SEQ ID NO: 98 - protein, 482 aa, synthetic construct
  REGION 1..482: note = human ADA2 R441A, mature numbering
IDETRAHLLLKEKMMRLGGRLVLNTKEELANERLMTLKIAEMKEAMRTLIFPPSMHFFQAKHLIERSQVFNILRMMPKGAALHLHDIGIVTMDWLVRNVTYRPHCHICFTPRGIMQFRFAHPTPRPSEKCSKWILLEDYRKRVQNVTEFDDSLLRNFTLVTQHPEVIYTNQNVVWSKFETIFFTISGLIHYAPVFRDYVFRSMQEFYEDNVLYMEIRARLLPVYELSGEHHDEEWSVKTYQEVAQKFVETHPEFIGIKIIYSDHRSKDVAVIAESIRMAMGLRIKFPTVVAGFDLVGHEDTGHSLHDYKEALMIPAKDGVKLPYFFHAGETDWQGTSIDRNILDALMLNTTRIGHGFALSKHPAVRTYSWKKDIPIEVCPISNQVLKLVSDLRNHPVATLMATGHPMVISSDDPAMFGAKGLSYDFYEVFMGIGGMKADLATLKQLAMNSIKYSTLLESEKNTFMEIWKKRWDKFIADVATK

SEQ ID NO: 99 - protein, 482 aa, synthetic construct
  REGION 1..482: note = human ADA2 R441D, mature numbering
IDETRAHLLLKEKMMRLGGRLVLNTKEELANERLMTLKIAEMKEAMRTLIFPPSMHFFQAKHLIERSQVFNILRMMPKGAALHLHDIGIVTMDWLVRNVTYRPHCHICFTPRGIMQFRFAHPTPRPSEKCSKWILLEDYRKRVQNVTEFDDSLLRNFTLVTQHPEVIYTNQNVVWSKFETIFFTISGLIHYAPVFRDYVFRSMQEFYEDNVLYMEIRARLLPVYELSGEHHDEEWSVKTYQEVAQKFVETHPEFIGIKIIYSDHRSKDVAVIAESIRMAMGLRIKFPTVVAGFDLVGHEDTGHSLHDYKEALMIPAKDGVKLPYFFHAGETDWQGTSIDRNILDALMLNTTRIGHGFALSKHPAVRTYSWKKDIPIEVCPISNQVLKLVSDLRNHPVATLMATGHPMVISSDDPAMFGAKGLSYDFYEVFMGIGGMKADLDTLKQLAMNSIKYSTLLESEKNTFMEIWKKRWDKFIADVATK

SEQ ID NO: 100 - protein, 482 aa, synthetic construct
  REGION 1..482: note = human ADA2 R441E, mature numbering
IDETRAHLLLKEKMMRLGGRLVLNTKEELANERLMTLKIAEMKEAMRTLIFPPSMHFFQAKHLIERSQVFNILRMMPKGAALHLHDIGIVTMDWLVRNVTYRPHCHICFTPRGIMQFRFAHPTPRPSEKCSKWILLEDYRKRVQNVTEFDDSLLRNFTLVTQHPEVIYTNQNVVWSKFETIFFTISGLIHYAPVFRDYVFRSMQEFYEDNVLYMEIRARLLPVYELSGEHHDEEWSVKTYQEVAQKFVETHPEFIGIKIIYSDHRSKDVAVIAESIRMAMGLRIKFPTVVAGFDLVGHEDTGHSLHDYKEALMIPAKDGVKLPYFFHAGETDWQGTSIDRNILDALMLNTTRIGHGFALSKHPAVRTYSWKKDIPIEVCPISNQVLKLVSDLRNHPVATLMATGHPMVISSDDPAMFGAKGLSYDFYEVFMGIGGMKADLETLKQLAMNSIKYSTLLESEKNTFMEIWKKRWDKFIADVATK

SEQ ID NO: 101 - protein, 482 aa, synthetic construct
  REGION 1..482: note = human ADA2 K444A, mature numbering
IDETRAHLLLKEKMMRLGGRLVLNTKEELANERLMTLKIAEMKEAMRTLIFPPSMHFFQAKHLIERSQVFNILRMMPKGAALHLHDIGIVTMDWLVRNVTYRPHCHICFTPRGIMQFRFAHPTPRPSEKCSKWILLEDYRKRVQNVTEFDDSLLRNFTLVTQHPEVIYTNQNVVWSKFETIFFTISGLIHYAPVFRDYVFRSMQEFYEDNVLYMEIRARLLPVYELSGEHHDEEWSVKTYQEVAQKFVETHPEFIGIKIIYSDHRSKDVAVIAESIRMAMGLRIKFPTVVAGFDLVGHEDTGHSLHDYKEALMIPAKDGVKLPYFFHAGETDWQGTSIDRNILDALMLNTTRIGHGFALSKHPAVRTYSWKKDIPIEVCPISNQVLKLVSDLRNHPVATLMATGHPMVISSDDPAMFGAKGLSYDFYEVFMGIGGMKADLRTLAQLAMNSIKYSTLLESEKNTFMEIWKKRWDKFIADVATK

SEQ ID NO: 102 - protein, 482 aa, synthetic construct
  REGION 1..482: note = human ADA2 K444D, mature numbering
IDETRAHLLLKEKMMRLGGRLVLNTKEELANERLMTLKIAEMKEAMRTLIFPPSMHFFQAKHLIERSQVFNILRMMPKGAALHLHDIGIVTMDWLVRNVTYRPHCHICFTPRGIMQFRFAHPTPRPSEKCSKWILLEDYRKRVQNVTEFDDSLLRNFTLVTQHPEVIYTNQNVVWSKFETIFFTISGLIHYAPVFRDYVFRSMQEFYEDNVLYMEIRARLLPVYELSGEHHDEEWSVKTYQEVAQKFVETHPEFIGIKIIYSDHRSKDVAVIAESIRMAMGLRIKFPTVVAGFDLVGHEDTGHSLHDYKEALMIPAKDGVKLPYFFHAGETDWQGTSIDRNILDALMLNTTRIGHGFALSKHPAVRTYSWKKDIPIEVCPISNQVLKLVSDLRNHPVATLMATGHPMVISSDDPAMFGAKGLSYDFYEVFMGIGGMKADLRTLDQLAMNSIKYSTLLESEKNTFMEIWKKRWDKFIADVATK

SEQ ID NO: 103 - protein, 482 aa, synthetic construct
  REGION 1..482: note = human ADA2 K444E, mature numbering
IDETRAHLLLKEKMMRLGGRLVLNTKEELANERLMTLKIAEMKEAMRTLIFPPSMHFFQAKHLIERSQVFNILRMMPKGAALHLHDIGIVTMDWLVRNVTYRPHCHICFTPRGIMQFRFAHPTPRPSEKCSKWILLEDYRKRVQNVTEFDDSLLRNFTLVTQHPEVIYTNQNVVWSKFETIFFTISGLIHYAPVFRDYVFRSMQEFYEDNVLYMEIRARLLPVYELSGEHHDEEWSVKTYQEVAQKFVETHPEFIGIKIIYSDHRSKDVAVIAESIRMAMGLRIKFPTVVAGFDLVGHEDTGHSLHDYKEALMIPAKDGVKLPYFFHAGETDWQGTSIDRNILDALMLNTTRIGHGFALSKHPAVRTYSWKKDIPIEVCPISNQVLKLVSDLRNHPVATLMATGHPMVISSDDPAMFGAKGLSYDFYEVFMGIGGMKADLRTLEQLAMNSIKYSTLLESEKNTFMEIWKKRWDKFIADVATK

SEQ ID NO: 104 - protein, 482 aa, synthetic construct
  REGION 1..482: note = human ADA2 K461A, mature numbering
IDETRAHLLLKEKMMRLGGRLVLNTKEELANERLMTLKIAEMKEAMRTLIFPPSMHFFQAKHLIERSQVFNILRMMPKGAALHLHDIGIVTMDWLVRNVTYRPHCHICFTPRGIMQFRFAHPTPRPSEKCSKWILLEDYRKRVQNVTEFDDSLLRNFTLVTQHPEVIYTNQNVVWSKFETIFFTISGLIHYAPVFRDYVFRSMQEFYEDNVLYMEIRARLLPVYELSGEHHDEEWSVKTYQEVAQKFVETHPEFIGIKIIYSDHRSKDVAVIAESIRMAMGLRIKFPTVVAGFDLVGHEDTGHSLHDYKEALMIPAKDGVKLPYFFHAGETDWQGTSIDRNILDALMLNTTRIGHGFALSKHPAVRTYSWKKDIPIEVCPISNQVLKLVSDLRNHPVATLMATGHPMVISSDDPAMFGAKGLSYDFYEVFMGIGGMKADLRTLKQLAMNSIKYSTLLESEANTFMEIWKKRWDKFIADVATK

SEQ ID NO: 105 - protein, 482 aa, synthetic construct
  REGION 1..482: note = human ADA2 K461D, mature numbering
IDETRAHLLLKEKMMRLGGRLVLNTKEELANERLMTLKIAEMKEAMRTLIFPPSMHFFQAKHLIERSQVFNILRMMPKGAALHLHDIGIVTMDWLVRNVTYRPHCHICFTPRGIMQFRFAHPTPRPSEKCSKWILLEDYRKRVQNVTEFDDSLLRNFTLVTQHPEVIYTNQNVVWSKFETIFFTISGLIHYAPVFRDYVFRSMQEFYEDNVLYMEIRARLLPVYELSGEHHDEEWSVKTYQEVAQKFVETHPEFIGIKIIYSDHRSKDVAVIAESIRMAMGLRIKFPTVVAGFDLVGHEDTGHSLHDYKEALMIPAKDGVKLPYFFHAGETDWQGTSIDRNILDALMLNTTRIGHGFALSKHPAVRTYSWKKDIPIEVCPISNQVLKLVSDLRNHPVATLMATGHPMVISSDDPAMFGAKGLSYDFYEVFMGIGGMKADLRTLKQLAMNSIKYSTLLESEDNTFMEIWKKRWDKFIADVATK

SEQ ID NO: 106 - protein, 482 aa, synthetic construct
  REGION 1..482: note = human ADA2 K461E, mature numbering
IDETRAHLLLKEKMMRLGGRLVLNTKEELANERLMTLKIAEMKEAMRTLIFPPSMHFFQAKHLIERSQVFNILRMMPKGAALHLHDIGIVTMDWLVRNVTYRPHCHICFTPRGIMQFRFAHPTPRPSEKCSKWILLEDYRKRVQNVTEFDDSLLRNFTLVTQHPEVIYTNQNVVWSKFETIFFTISGLIHYAPVFRDYVFRSMQEFYEDNVLYMEIRARLLPVYELSGEHHDEEWSVKTYQEVAQKFVETHPEFIGIKIIYSDHRSKDVAVIAESIRMAMGLRIKFPTVVAGFDLVGHEDTGHSLHDYKEALMIPAKDGVKLPYFFHAGETDWQGTSIDRNILDALMLNTTRIGHGFALSKHPAVRTYSWKKDIPIEVCPISNQVLKLVSDLRNHPVATLMATGHPMVISSDDPAMFGAKGLSYDFYEVFMGIGGMKADLRTLKQLAMNSIKYSTLLESEENTFMEIWKKRWDKFIADVATK

SEQ ID NO: 107 - protein, 482 aa, synthetic construct
  REGION 1..482: note = human ADA2 K469A, mature numbering
IDETRAHLLLKEKMMRLGGRLVLNTKEELANERLMTLKIAEMKEAMRTLIFPPSMHFFQAKHLIERSQVFNILRMMPKGAALHLHDIGIVTMDWLVRNVTYRPHCHICFTPRGIMQFRFAHPTPRPSEKCSKWILLEDYRKRVQNVTEFDDSLLRNFTLVTQHPEVIYTNQNVVWSKFETIFFTISGLIHYAPVFRDYVFRSMQEFYEDNVLYMEIRARLLPVYELSGEHHDEEWSVKTYQEVAQKFVETHPEFIGIKIIYSDHRSKDVAVIAESIRMAMGLRIKFPTVVAGFDLVGHEDTGHSLHDYKEALMIPAKDGVKLPYFFHAGETDWQGTSIDRNILDALMLNTTRIGHGFALSKHPAVRTYSWKKDIPIEVCPISNQVLKLVSDLRNHPVATLMATGHPMVISSDDPAMFGAKGLSYDFYEVFMGIGGMKADLRTLKQLAMNSIKYSTLLESEKNTFMEIWAKRWDKFIADVATK

SEQ ID NO: 108 - protein, 482 aa, synthetic construct
  REGION 1..482: note = human ADA2 K469D, mature numbering
IDETRAHLLLKEKMMRLGGRLVLNTKEELANERLMTLKIAEMKEAMRTLIFPPSMHFFQAKHLIERSQVFNILRMMPKGAALHLHDIGIVTMDWLVRNVTYRPHCHICFTPRGIMQFRFAHPTPRPSEKCSKWILLEDYRKRVQNVTEFDDSLLRNFTLVTQHPEVIYTNQNVVWSKFETIFFTISGLIHYAPVFRDYVFRSMQEFYEDNVLYMEIRARLLPVYELSGEHHDEEWSVKTYQEVAQKFVETHPEFIGIKIIYSDHRSKDVAVIAESIRMAMGLRIKFPTVVAGFDLVGHEDTGHSLHDYKEALMIPAKDGVKLPYFFHAGETDWQGTSIDRNILDALMLNTTRIGHGFALSKHPAVRTYSWKKDIPIEVCPISNQVLKLVSDLRNHPVATLMATGHPMVISSDDPAMFGAKGLSYDFYEVFMGIGGMKADLRTLKQLAMNSIKYSTLLESEKNTFMEIWDKRWDKFIADVATK

SEQ ID NO: 109 - protein, 482 aa, synthetic construct
  REGION 1..482: note = human ADA2 K469E, mature numbering
IDETRAHLLLKEKMMRLGGRLVLNTKEELANERLMTLKIAEMKEAMRTLIFPPSMHFFQAKHLIERSQVFNILRMMPKGAALHLHDIGIVTMDWLVRNVTYRPHCHICFTPRGIMQFRFAHPTPRPSEKCSKWILLEDYRKRVQNVTEFDDSLLRNFTLVTQHPEVIYTNQNVVWSKFETIFFTISGLIHYAPVFRDYVFRSMQEFYEDNVLYMEIRARLLPVYELSGEHHDEEWSVKTYQEVAQKFVETHPEFIGIKIIYSDHRSKDVAVIAESIRMAMGLRIKFPTVVAGFDLVGHEDTGHSLHDYKEALMIPAKDGVKLPYFFHAGETDWQGTSIDRNILDALMLNTTRIGHGFALSKHPAVRTYSWKKDIPIEVCPISNQVLKLVSDLRNHPVATLMATGHPMVISSDDPAMFGAKGLSYDFYEVFMGIGGMKADLRTLKQLAMNSIKYSTLLESEKNTFMEIWEKRWDKFIADVATK

SEQ ID NO: 110 - protein, 482 aa, synthetic construct
  REGION 1..482: note = human ADA2 K470A, mature numbering
IDETRAHLLLKEKMMRLGGRLVLNTKEELANERLMTLKIAEMKEAMRTLIFPPSMHFFQAKHLIERSQVFNILRMMPKGAALHLHDIGIVTMDWLVRNVTYRPHCHICFTPRGIMQFRFAHPTPRPSEKCSKWILLEDYRKRVQNVTEFDDSLLRNFTLVTQHPEVIYTNQNVVWSKFETIFFTISGLIHYAPVFRDYVFRSMQEFYEDNVLYMEIRARLLPVYELSGEHHDEEWSVKTYQEVAQKFVETHPEFIGIKIIYSDHRSKDVAVIAESIRMAMGLRIKFPTVVAGFDLVGHEDTGHSLHDYKEALMIPAKDGVKLPYFFHAGETDWQGTSIDRNILDALMLNTTRIGHGFALSKHPAVRTYSWKKDIPIEVCPISNQVLKLVSDLRNHPVATLMATGHPMVISSDDPAMFGAKGLSYDFYEVFMGIGGMKADLRTLKQLAMNSIKYSTLLESEKNTFMEIWKARWDKFIADVATK

SEQ ID NO: 111 - protein, 482 aa, synthetic construct
  REGION 1..482: note = human ADA2 K470D, mature numbering
IDETRAHLLLKEKMMRLGGRLVLNTKEELANERLMTLKIAEMKEAMRTLIFPPSMHFFQAKHLIERSQVFNILRMMPKGAALHLHDIGIVTMDWLVRNVTYRPHCHICFTPRGIMQFRFAHPTPRPSEKCSKWILLEDYRKRVQNVTEFDDSLLRNFTLVTQHPEVIYTNQNVVWSKFETIFFTISGLIHYAPVFRDYVFRSMQEFYEDNVLYMEIRARLLPVYELSGEHHDEEWSVKTYQEVAQKFVETHPEFIGIKIIYSDHRSKDVAVIAESIRMAMGLRIKFPTVVAGFDLVGHEDTGHSLHDYKEALMIPAKDGVKLPYFFHAGETDWQGTSIDRNILDALMLNTTRIGHGFALSKHPAVRTYSWKKDIPIEVCPISNQVLKLVSDLRNHPVATLMATGHPMVISSDDPAMFGAKGLSYDFYEVFMGIGGMKADLRTLKQLAMNSIKYSTLLESEKNTFMEIWKDRWDKFIADVATK

SEQ ID NO: 112 - protein, 482 aa, synthetic construct
  REGION 1..482: note = human ADA2 K470E, mature numbering
IDETRAHLLLKEKMMRLGGRLVLNTKEELANERLMTLKIAEMKEAMRTLIFPPSMHFFQAKHLIERSQVFNILRMMPKGAALHLHDIGIVTMDWLVRNVTYRPHCHICFTPRGIMQFRFAHPTPRPSEKCSKWILLEDYRKRVQNVTEFDDSLLRNFTLVTQHPEVIYTNQNVVWSKFETIFFTISGLIHYAPVFRDYVFRSMQEFYEDNVLYMEIRARLLPVYELSGEHHDEEWSVKTYQEVAQKFVETHPEFIGIKIIYSDHRSKDVAVIAESIRMAMGLRIKFPTVVAGFDLVGHEDTGHSLHDYKEALMIPAKDGVKLPYFFHAGETDWQGTSIDRNILDALMLNTTRIGHGFALSKHPAVRTYSWKKDIPIEVCPISNQVLKLVSDLRNHPVATLMATGHPMVISSDDPAMFGAKGLSYDFYEVFMGIGGMKADLRTLKQLAMNSIKYSTLLESEKNTFMEIWKERWDKFIADVATK

SEQ ID NO: 113 - protein, 482 aa, synthetic construct
  REGION 1..482: note = human ADA2 D86A, mature numbering
IDETRAHLLLKEKMMRLGGRLVLNTKEELANERLMTLKIAEMKEAMRTLIFPPSMHFFQAKHLIERSQVFNILRMMPKGAALHLHAIGIVTMDWLVRNVTYRPHCHICFTPRGIMQFRFAHPTPRPSEKCSKWILLEDYRKRVQNVTEFDDSLLRNFTLVTQHPEVIYTNQNVVWSKFETIFFTISGLIHYAPVFRDYVFRSMQEFYEDNVLYMEIRARLLPVYELSGEHHDEEWSVKTYQEVAQKFVETHPEFIGIKIIYSDHRSKDVAVIAESIRMAMGLRIKFPTVVAGFDLVGHEDTGHSLHDYKEALMIPAKDGVKLPYFFHAGETDWQGTSIDRNILDALMLNTTRIGHGFALSKHPAVRTYSWKKDIPIEVCPISNQVLKLVSDLRNHPVATLMATGHPMVISSDDPAMFGAKGLSYDFYEVFMGIGGMKADLRTLKQLAMNSIKYSTLLESEKNTFMEIWKKRWDKFIADVATK

SEQ ID NO: 114 - protein, 482 aa, synthetic construct
  REGION 1..482: note = human ADA2 D86C, mature numbering
IDETRAHLLLKEKMMRLGGRLVLNTKEELANERLMTLKIAEMKEAMRTLIFPPSMHFFQAKHLIERSQVFNILRMMPKGAALHLHCIGIVTMDWLVRNVTYRPHCHICFTPRGIMQFRFAHPTPRPSEKCSKWILLEDYRKRVQNVTEFDDSLLRNFTLVTQHPEVIYTNQNVVWSKFETIFFTISGLIHYAPVFRDYVFRSMQEFYEDNVLYMEIRARLLPVYELSGEHHDEEWSVKTYQEVAQKFVETHPEFIGIKIIYSDHRSKDVAVIAESIRMAMGLRIKFPTVVAGFDLVGHEDTGHSLHDYKEALMIPAKDGVKLPYFFHAGETDWQGTSIDRNILDALMLNTTRIGHGFALSKHPAVRTYSWKKDIPIEVCPISNQVLKLVSDLRNHPVATLMATGHPMVISSDDPAMFGAKGLSYDFYEVFMGIGGMKADLRTLKQLAMNSIKYSTLLESEKNTFMEIWKKRWDKFIADVATK

SEQ ID NO: 115 - protein, 482 aa, synthetic construct
  REGION 1..482: note = human ADA2 D86E, mature numbering
IDETRAHLLLKEKMMRLGGRLVLNTKEELANERLMTLKIAEMKEAMRTLIFPPSMHFFQAKHLIERSQVFNILRMMPKGAALHLHEIGIVTMDWLVRNVTYRPHCHICFTPRGIMQFRFAHPTPRPSEKCSKWILLEDYRKRVQNVTEFDDSLLRNFTLVTQHPEVIYTNQNVVWSKFETIFFTISGLIHYAPVFRDYVFRSMQEFYEDNVLYMEIRARLLPVYELSGEHHDEEWSVKTYQEVAQKFVETHPEFIGIKIIYSDHRSKDVAVIAESIRMAMGLRIKFPTVVAGFDLVGHEDTGHSLHDYKEALMIPAKDGVKLPYFFHAGETDWQGTSIDRNILDALMLNTTRIGHGFALSKHPAVRTYSWKKDIPIEVCPISNQVLKLVSDLRNHPVATLMATGHPMVISSDDPAMFGAKGLSYDFYEVFMGIGGMKADLRTLKQLAMNSIKYSTLLESEKNTFMEIWKKRWDKFIADVATK

SEQ ID NO: 116 - protein, 482 aa, synthetic construct
  REGION 1..482: note = human ADA2 D86F, mature numbering
IDETRAHLLLKEKMMRLGGRLVLNTKEELANERLMTLKIAEMKEAMRTLIFPPSMHFFQAKHLIERSQVFNILRMMPKGAALHLHFIGIVTMDWLVRNVTYRPHCHICFTPRGIMQFRFAHPTPRPSEKCSKWILLEDYRKRVQNVTEFDDSLLRNFTLVTQHPEVIYTNQNVVWSKFETIFFTISGLIHYAPVFRDYVFRSMQEFYEDNVLYMEIRARLLPVYELSGEHHDEEWSVKTYQEVAQKFVETHPEFIGIKIIYSDHRSKDVAVIAESIRMAMGLRIKFPTVVAGFDLVGHEDTGHSLHDYKEALMIPAKDGVKLPYFFHAGETDWQGTSIDRNILDALMLNTTRIGHGFALSKHPAVRTYSWKKDIPIEVCPISNQVLKLVSDLRNHPVATLMATGHPMVISSDDPAMFGAKGLSYDFYEVFMGIGGMKADLRTLKQLAMNSIKYSTLLESEKNTFMEIWKKRWDKFIADVATK

SEQ ID NO: 117 - protein, 482 aa, synthetic construct
  REGION 1..482: note = human ADA2 D86G, mature numbering
IDETRAHLLLKEKMMRLGGRLVLNTKEELANERLMTLKIAEMKEAMRTLIFPPSMHFFQAKHLIERSQVFNILRMMPKGAALHLHGIGIVTMDWLVRNVTYRPHCHICFTPRGIMQFRFAHPTPRPSEKCSKWILLEDYRKRVQNVTEFDDSLLRNFTLVTQHPEVIYTNQNVVWSKFETIFFTISGLIHYAPVFRDYVFRSMQEFYEDNVLYMEIRARLLPVYELSGEHHDEEWSVKTYQEVAQKFVETHPEFIGIKIIYSDHRSKDVAVIAESIRMAMGLRIKFPTVVAGFDLVGHEDTGHSLHDYKEALMIPAKDGVKLPYFFHAGETDWQGTSIDRNILDALMLNTTRIGHGFALSKHPAVRTYSWKKDIPIEVCPISNQVLKLVSDLRNHPVATLMATGHPMVISSDDPAMFGAKGLSYDFYEVFMGIGGMKADLRTLKQLAMNSIKYSTLLESEKNTFMEIWKKRWDKFIADVATK

SEQ ID NO: 118 - protein, 482 aa, synthetic construct
  REGION 1..482: note = human ADA2 D86H, mature numbering
IDETRAHLLLKEKMMRLGGRLVLNTKEELANERLMTLKIAEMKEAMRTLIFPPSMHFFQAKHLIERSQVFNILRMMPKGAALHLHHIGIVTMDWLVRNVTYRPHCHICFTPRGIMQFRFAHPTPRPSEKCSKWILLEDYRKRVQNVTEFDDSLLRNFTLVTQHPEVIYTNQNVVWSKFETIFFTISGLIHYAPVFRDYVFRSMQEFYEDNVLYMEIRARLLPVYELSGEHHDEEWSVKTYQEVAQKFVETHPEFIGIKIIYSDHRSKDVAVIAESIRMAMGLRIKFPTVVAGFDLVGHEDTGHSLHDYKEALMIPAKDGVKLPYFFHAGETDWQGTSIDRNILDALMLNTTRIGHGFALSKHPAVRTYSWKKDIPIEVCPISNQVLKLVSDLRNHPVATLMATGHPMVISSDDPAMFGAKGLSYDFYEVFMGIGGMKADLRTLKQLAMNSIKYSTLLESEKNTFMEIWKKRWDKFIADVATK

SEQ ID NO: 119 - protein, 482 aa, synthetic construct
  REGION 1..482: note = human ADA2 D86I, mature numbering
IDETRAHLLLKEKMMRLGGRLVLNTKEELANERLMTLKIAEMKEAMRTLIFPPSMHFFQAKHLIERSQVFNILRMMPKGAALHLHIIGIVTMDWLVRNVTYRPHCHICFTPRGIMQFRFAHPTPRPSEKCSKWILLEDYRKRVQNVTEFDDSLLRNFTLVTQHPEVIYTNQNVVWSKFETIFFTISGLIHYAPVFRDYVFRSMQEFYEDNVLYMEIRARLLPVYELSGEHHDEEWSVKTYQEVAQKFVETHPEFIGIKIIYSDHRSKDVAVIAESIRMAMGLRIKFPTVVAGFDLVGHEDTGHSLHDYKEALMIPAKDGVKLPYFFHAGETDWQGTSIDRNILDALMLNTTRIGHGFALSKHPAVRTYSWKKDIPIEVCPISNQVLKLVSDLRNHPVATLMATGHPMVISSDDPAMFGAKGLSYDFYEVFMGIGGMKADLRTLKQLAMNSIKYSTLLESEKNTFMEIWKKRWDKFIADVATK

SEQ ID NO: 120 - protein, 482 aa, synthetic construct
  REGION 1..482: note = human ADA2 D86K, mature numbering
IDETRAHLLLKEKMMRLGGRLVLNTKEELANERLMTLKIAEMKEAMRTLIFPPSMHFFQAKHLIERSQVFNILRMMPKGAALHLHKIGIVTMDWLVRNVTYRPHCHICFTPRGIMQFRFAHPTPRPSEKCSKWILLEDYRKRVQNVTEFDDSLLRNFTLVTQHPEVIYTNQNVVWSKFETIFFTISGLIHYAPVFRDYVFRSMQEFYEDNVLYMEIRARLLPVYELSGEHHDEEWSVKTYQEVAQKFVETHPEFIGIKIIYSDHRSKDVAVIAESIRMAMGLRIKFPTVVAGFDLVGHEDTGHSLHDYKEALMIPAKDGVKLPYFFHAGETDWQGTSIDRNILDALMLNTTRIGHGFALSKHPAVRTYSWKKDIPIEVCPISNQVLKLVSDLRNHPVATLMATGHPMVISSDDPAMFGAKGLSYDFYEVFMGIGGMKADLRTLKQLAMNSIKYSTLLESEKNTFMEIWKKRWDKFIADVATK

SEQ ID NO: 121 - protein, 482 aa, synthetic construct
  REGION 1..482: note = human ADA2 D86L, mature numbering
IDETRAHLLLKEKMMRLGGRLVLNTKEELANERLMTLKIAEMKEAMRTLIFPPSMHFFQAKHLIERSQVFNILRMMPKGAALHLHLIGIVTMDWLVRNVTYRPHCHICFTPRGIMQFRFAHPTPRPSEKCSKWILLEDYRKRVQNVTEFDDSLLRNFTLVTQHPEVIYTNQNVVWSKFETIFFTISGLIHYAPVFRDYVFRSMQEFYEDNVLYMEIRARLLPVYELSGEHHDEEWSVKTYQEVAQKFVETHPEFIGIKIIYSDHRSKDVAVIAESIRMAMGLRIKFPTVVAGFDLVGHEDTGHSLHDYKEALMIPAKDGVKLPYFFHAGETDWQGTSIDRNILDALMLNTTRIGHGFALSKHPAVRTYSWKKDIPIEVCPISNQVLKLVSDLRNHPVATLMATGHPMVISSDDPAMFGAKGLSYDFYEVFMGIGGMKADLRTLKQLAMNSIKYSTLLESEKNTFMEIWKKRWDKFIADVATK

SEQ ID NO: 122 - protein, 482 aa, synthetic construct
  REGION 1..482: note = human ADA2 D86M, mature numbering
IDETRAHLLLKEKMMRLGGRLVLNTKEELANERLMTLKIAEMKEAMRTLIFPPSMHFFQAKHLIERSQVFNILRMMPKGAALHLHMIGIVTMDWLVRNVTYRPHCHICFTPRGIMQFRFAHPTPRPSEKCSKWILLEDYRKRVQNVTEFDDSLLRNFTLVTQHPEVIYTNQNVVWSKFETIFFTISGLIHYAPVFRDYVFRSMQEFYEDNVLYMEIRARLLPVYELSGEHHDEEWSVKTYQEVAQKFVETHPEFIGIKIIYSDHRSKDVAVIAESIRMAMGLRIKFPTVVAGFDLVGHEDTGHSLHDYKEALMIPAKDGVKLPYFFHAGETDWQGTSIDRNILDALMLNTTRIGHGFALSKHPAVRTYSWKKDIPIEVCPISNQVLKLVSDLRNHPVATLMATGHPMVISSDDPAMFGAKGLSYDFYEVFMGIGGMKADLRTLKQLAMNSIKYSTLLESEKNTFMEIWKKRWDKFIADVATK

SEQ ID NO: 123 - protein, 482 aa, synthetic construct
  REGION 1..482: note = human ADA2 D86N, mature numbering
IDETRAHLLLKEKMMRLGGRLVLNTKEELANERLMTLKIAEMKEAMRTLIFPPSMHFFQAKHLIERSQVFNILRMMPKGAALHLHNIGIVTMDWLVRNVTYRPHCHICFTPRGIMQFRFAHPTPRPSEKCSKWILLEDYRKRVQNVTEFDDSLLRNFTLVTQHPEVIYTNQNVVWSKFETIFFTISGLIHYAPVFRDYVFRSMQEFYEDNVLYMEIRARLLPVYELSGEHHDEEWSVKTYQEVAQKFVETHPEFIGIKIIYSDHRSKDVAVIAESIRMAMGLRIKFPTVVAGFDLVGHEDTGHSLHDYKEALMIPAKDGVKLPYFFHAGETDWQGTSIDRNILDALMLNTTRIGHGFALSKHPAVRTYSWKKDIPIEVCPISNQVLKLVSDLRNHPVATLMATGHPMVISSDDPAMFGAKGLSYDFYEVFMGIGGMKADLRTLKQLAMNSIKYSTLLESEKNTFMEIWKKRWDKFIADVATK

SEQ ID NO: 124 - protein, 482 aa, synthetic construct
  REGION 1..482: note = human ADA2 D86P, mature numbering
IDETRAHLLLKEKMMRLGGRLVLNTKEELANERLMTLKIAEMKEAMRTLIFPPSMHFFQAKHLIERSQVFNILRMMPKGAALHLHPIGIVTMDWLVRNVTYRPHCHICFTPRGIMQFRFAHPTPRPSEKCSKWILLEDYRKRVQNVTEFDDSLLRNFTLVTQHPEVIYTNQNVVWSKFETIFFTISGLIHYAPVFRDYVFRSMQEFYEDNVLYMEIRARLLPVYELSGEHHDEEWSVKTYQEVAQKFVETHPEFIGIKIIYSDHRSKDVAVIAESIRMAMGLRIKFPTVVAGFDLVGHEDTGHSLHDYKEALMIPAKDGVKLPYFFHAGETDWQGTSIDRNILDALMLNTTRIGHGFALSKHPAVRTYSWKKDIPIEVCPISNQVLKLVSDLRNHPVATLMATGHPMVISSDDPAMFGAKGLSYDFYEVFMGIGGMKADLRTLKQLAMNSIKYSTLLESEKNTFMEIWKKRWDKFIADVATK

SEQ ID NO: 125 - protein, 482 aa, synthetic construct
  REGION 1..482: note = human ADA2 D86Q, mature numbering
IDETRAHLLLKEKMMRLGGRLVLNTKEELANERLMTLKIAEMKEAMRTLIFPPSMHFFQAKHLIERSQVFNILRMMPKGAALHLHQIGIVTMDWLVRNVTYRPHCHICFTPRGIMQFRFAHPTPRPSEKCSKWILLEDYRKRVQNVTEFDDSLLRNFTLVTQHPEVIYTNQNVVWSKFETIFFTISGLIHYAPVFRDYVFRSMQEFYEDNVLYMEIRARLLPVYELSGEHHDEEWSVKTYQEVAQKFVETHPEFIGIKIIYSDHRSKDVAVIAESIRMAMGLRIKFPTVVAGFDLVGHEDTGHSLHDYKEALMIPAKDGVKLPYFFHAGETDWQGTSIDRNILDALMLNTTRIGHGFALSKHPAVRTYSWKKDIPIEVCPISNQVLKLVSDLRNHPVATLMATGHPMVISSDDPAMFGAKGLSYDFYEVFMGIGGMKADLRTLKQLAMNSIKYSTLLESEKNTFMEIWKKRWDKFIADVATK

SEQ ID NO: 126 - protein, 482 aa, synthetic construct
  REGION 1..482: note = human ADA2 D86R, mature numbering
IDETRAHLLLKEKMMRLGGRLVLNTKEELANERLMTLKIAEMKEAMRTLIFPPSMHFFQAKHLIERSQVFNILRMMPKGAALHLHRIGIVTMDWLVRNVTYRPHCHICFTPRGIMQFRFAHPTPRPSEKCSKWILLEDYRKRVQNVTEFDDSLLRNFTLVTQHPEVIYTNQNVVWSKFETIFFTISGLIHYAPVFRDYVFRSMQEFYEDNVLYMEIRARLLPVYELSGEHHDEEWSVKTYQEVAQKFVETHPEFIGIKIIYSDHRSKDVAVIAESIRMAMGLRIKFPTVVAGFDLVGHEDTGHSLHDYKEALMIPAKDGVKLPYFFHAGETDWQGTSIDRNILDALMLNTTRIGHGFALSKHPAVRTYSWKKDIPIEVCPISNQVLKLVSDLRNHPVATLMATGHPMVISSDDPAMFGAKGLSYDFYEVFMGIGGMKADLRTLKQLAMNSIKYSTLLESEKNTFMEIWKKRWDKFIADVATK

SEQ ID NO: 127 - protein, 482 aa, synthetic construct
  REGION 1..482: note = human ADA2 D86S, mature numbering
IDETRAHLLLKEKMMRLGGRLVLNTKEELANERLMTLKIAEMKEAMRTLIFPPSMHFFQAKHLIERSQVFNILRMMPKGAALHLHSIGIVTMDWLVRNVTYRPHCHICFTPRGIMQFRFAHPTPRPSEKCSKWILLEDYRKRVQNVTEFDDSLLRNFTLVTQHPEVIYTNQNVVWSKFETIFFTISGLIHYAPVFRDYVFRSMQEFYEDNVLYMEIRARLLPVYELSGEHHDEEWSVKTYQEVAQKFVETHPEFIGIKIIYSDHRSKDVAVIAESIRMAMGLRIKFPTVVAGFDLVGHEDTGHSLHDYKEALMIPAKDGVKLPYFFHAGETDWQGTSIDRNILDALMLNTTRIGHGFALSKHPAVRTYSWKKDIPIEVCPISNQVLKLVSDLRNHPVATLMATGHPMVISSDDPAMFGAKGLSYDFYEVFMGIGGMKADLRTLKQLAMNSIKYSTLLESEKNTFMEIWKKRWDKFIADVATK

SEQ ID NO: 128 - protein, 482 aa, synthetic construct
  REGION 1..482: note = human ADA2 D86T, mature numbering
IDETRAHLLLKEKMMRLGGRLVLNTKEELANERLMTLKIAEMKEAMRTLIFPPSMHFFQAKHLIERSQVFNILRMMPKGAALHLHTIGIVTMDWLVRNVTYRPHCHICFTPRGIMQFRFAHPTPRPSEKCSKWILLEDYRKRVQNVTEFDDSLLRNFTLVTQHPEVIYTNQNVVWSKFETIFFTISGLIHYAPVFRDYVFRSMQEFYEDNVLYMEIRARLLPVYELSGEHHDEEWSVKTYQEVAQKFVETHPEFIGIKIIYSDHRSKDVAVIAESIRMAMGLRIKFPTVVAGFDLVGHEDTGHSLHDYKEALMIPAKDGVKLPYFFHAGETDWQGTSIDRNILDALMLNTTRIGHGFALSKHPAVRTYSWKKDIPIEVCPISNQVLKLVSDLRNHPVATLMATGHPMVISSDDPAMFGAKGLSYDFYEVFMGIGGMKADLRTLKQLAMNSIKYSTLLESEKNTFMEIWKKRWDKFIADVATK

SEQ ID NO: 129 - protein, 482 aa, synthetic construct
  REGION 1..482: note = human ADA2 D86V, mature numbering
IDETRAHLLLKEKMMRLGGRLVLNTKEELANERLMTLKIAEMKEAMRTLIFPPSMHFFQAKHLIERSQVFNILRMMPKGAALHLHVIGIVTMDWLVRNVTYRPHCHICFTPRGIMQFRFAHPTPRPSEKCSKWILLEDYRKRVQNVTEFDDSLLRNFTLVTQHPEVIYTNQNVVWSKFETIFFTISGLIHYAPVFRDYVFRSMQEFYEDNVLYMEIRARLLPVYELSGEHHDEEWSVKTYQEVAQKFVETHPEFIGIKIIYSDHRSKDVAVIAESIRMAMGLRIKFPTVVAGFDLVGHEDTGHSLHDYKEALMIPAKDGVKLPYFFHAGETDWQGTSIDRNILDALMLNTTRIGHGFALSKHPAVRTYSWKKDIPIEVCPISNQVLKLVSDLRNHPVATLMATGHPMVISSDDPAMFGAKGLSYDFYEVFMGIGGMKADLRTLKQLAMNSIKYSTLLESEKNTFMEIWKKRWDKFIADVATK

SEQ ID NO: 130 - protein, 482 aa, synthetic construct
  REGION 1..482: note = human ADA2 D86W, mature numbering
IDETRAHLLLKEKMMRLGGRLVLNTKEELANERLMTLKIAEMKEAMRTLIFPPSMHFFQAKHLIERSQVFNILRMMPKGAALHLHWIGIVTMDWLVRNVTYRPHCHICFTPRGIMQFRFAHPTPRPSEKCSKWILLEDYRKRVQNVTEFDDSLLRNFTLVTQHPEVIYTNQNVVWSKFETIFFTISGLIHYAPVFRDYVFRSMQEFYEDNVLYMEIRARLLPVYELSGEHHDEEWSVKTYQEVAQKFVETHPEFIGIKIIYSDHRSKDVAVIAESIRMAMGLRIKFPTVVAGFDLVGHEDTGHSLHDYKEALMIPAKDGVKLPYFFHAGETDWQGTSIDRNILDALMLNTTRIGHGFALSKHPAVRTYSWKKDIPIEVCPISNQVLKLVSDLRNHPVATLMATGHPMVISSDDPAMFGAKGLSYDFYEVFMGIGGMKADLRTLKQLAMNSIKYSTLLESEKNTFMEIWKKRWDKFIADVATK

SEQ ID NO: 131 - protein, 482 aa, synthetic construct
  REGION 1..482: note = human ADA2 D86Y, mature numbering
IDETRAHLLLKEKMMRLGGRLVLNTKEELANERLMTLKIAEMKEAMRTLIFPPSMHFFQAKHLIERSQVFNILRMMPKGAALHLHYIGIVTMDWLVRNVTYRPHCHICFTPRGIMQFRFAHPTPRPSEKCSKWILLEDYRKRVQNVTEFDDSLLRNFTLVTQHPEVIYTNQNVVWSKFETIFFTISGLIHYAPVFRDYVFRSMQEFYEDNVLYMEIRARLLPVYELSGEHHDEEWSVKTYQEVAQKFVETHPEFIGIKIIYSDHRSKDVAVIAESIRMAMGLRIKFPTVVAGFDLVGHEDTGHSLHDYKEALMIPAKDGVKLPYFFHAGETDWQGTSIDRNILDALMLNTTRIGHGFALSKHPAVRTYSWKKDIPIEVCPISNQVLKLVSDLRNHPVATLMATGHPMVISSDDPAMFGAKGLSYDFYEVFMGIGGMKADLRTLKQLAMNSIKYSTLLESEKNTFMEIWKKRWDKFIADVATK

SEQ ID NO: 132 - protein, 482 aa, synthetic construct
  REGION 1..482: note = human ADA2 E179C, mature numbering
IDETRAHLLLKEKMMRLGGRLVLNTKEELANERLMTLKIAEMKEAMRTLIFPPSMHFFQAKHLIERSQVFNILRMMPKGAALHLHDIGIVTMDWLVRNVTYRPHCHICFTPRGIMQFRFAHPTPRPSEKCSKWILLEDYRKRVQNVTEFDDSLLRNFTLVTQHPEVIYTNQNVVWSKFCTIFFTISGLIHYAPVFRDYVFRSMQEFYEDNVLYMEIRARLLPVYELSGEHHDEEWSVKTYQEVAQKFVETHPEFIGIKIIYSDHRSKDVAVIAESIRMAMGLRIKFPTVVAGFDLVGHEDTGHSLHDYKEALMIPAKDGVKLPYFFHAGETDWQGTSIDRNILDALMLNTTRIGHGFALSKHPAVRTYSWKKDIPIEVCPISNQVLKLVSDLRNHPVATLMATGHPMVISSDDPAMFGAKGLSYDFYEVFMGIGGMKADLRTLKQLAMNSIKYSTLLESEKNTFMEIWKKRWDKFIADVATK

SEQ ID NO: 133 - protein, 482 aa, synthetic construct
  REGION 1..482: note = human ADA2 E179F, mature numbering
IDETRAHLLLKEKMMRLGGRLVLNTKEELANERLMTLKIAEMKEAMRTLIFPPSMHFFQAKHLIERSQVFNILRMMPKGAALHLHDIGIVTMDWLVRNVTYRPHCHICFTPRGIMQFRFAHPTPRPSEKCSKWILLEDYRKRVQNVTEFDDSLLRNFTLVTQHPEVIYTNQNVVWSKFFTIFFTISGLIHYAPVFRDYVFRSMQEFYEDNVLYMEIRARLLPVYELSGEHHDEEWSVKTYQEVAQKFVETHPEFIGIKIIYSDHRSKDVAVIAESIRMAMGLRIKFPTVVAGFDLVGHEDTGHSLHDYKEALMIPAKDGVKLPYFFHAGETDWQGTSIDRNILDALMLNTTRIGHGFALSKHPAVRTYSWKKDIPIEVCPISNQVLKLVSDLRNHPVATLMATGHPMVISSDDPAMFGAKGLSYDFYEVFMGIGGMKADLRTLKQLAMNSIKYSTLLESEKNTFMEIWKKRWDKFIADVATK

SEQ ID NO: 134 - protein, 482 aa, synthetic construct
  REGION 1..482: note = human ADA2 E179H, mature numbering
IDETRAHLLLKEKMMRLGGRLVLNTKEELANERLMTLKIAEMKEAMRTLIFPPSMHFFQAKHLIERSQVFNILRMMPKGAALHLHDIGIVTMDWLVRNVTYRPHCHICFTPRGIMQFRFAHPTPRPSEKCSKWILLEDYRKRVQNVTEFDDSLLRNFTLVTQHPEVIYTNQNVVWSKFHTIFFTISGLIHYAPVFRDYVFRSMQEFYEDNVLYMEIRARLLPVYELSGEHHDEEWSVKTYQEVAQKFVETHPEFIGIKIIYSDHRSKDVAVIAESIRMAMGLRIKFPTVVAGFDLVGHEDTGHSLHDYKEALMIPAKDGVKLPYFFHAGETDWQGTSIDRNILDALMLNTTRIGHGFALSKHPAVRTYSWKKDIPIEVCPISNQVLKLVSDLRNHPVATLMATGHPMVISSDDPAMFGAKGLSYDFYEVFMGIGGMKADLRTLKQLAMNSIKYSTLLESEKNTFMEIWKKRWDKFIADVATK

SEQ ID NO: 135 - protein, 482 aa, synthetic construct
  REGION 1..482: note = human ADA2 E179I, mature numbering
IDETRAHLLLKEKMMRLGGRLVLNTKEELANERLMTLKIAEMKEAMRTLIFPPSMHFFQAKHLIERSQVFNILRMMPKGAALHLHDIGIVTMDWLVRNVTYRPHCHICFTPRGIMQFRFAHPTPRPSEKCSKWILLEDYRKRVQNVTEFDDSLLRNFTLVTQHPEVIYTNQNVVWSKFITIFFTISGLIHYAPVFRDYVFRSMQEFYEDNVLYMEIRARLLPVYELSGEHHDEEWSVKTYQEVAQKFVETHPEFIGIKIIYSDHRSKDVAVIAESIRMAMGLRIKFPTVVAGFDLVGHEDTGHSLHDYKEALMIPAKDGVKLPYFFHAGETDWQGTSIDRNILDALMLNTTRIGHGFALSKHPAVRTYSWKKDIPIEVCPISNQVLKLVSDLRNHPVATLMATGHPMVISSDDPAMFGAKGLSYDFYEVFMGIGGMKADLRTLKQLAMNSIKYSTLLESEKNTFMEIWKKRWDKFIADVATK

SEQ ID NO: 136 - protein, 482 aa, synthetic construct
  REGION 1..482: note = human ADA2 E179K, mature numbering
IDETRAHLLLKEKMMRLGGRLVLNTKEELANERLMTLKIAEMKEAMRTLIFPPSMHFFQAKHLIERSQVFNILRMMPKGAALHLHDIGIVTMDWLVRNVTYRPHCHICFTPRGIMQFRFAHPTPRPSEKCSKWILLEDYRKRVQNVTEFDDSLLRNFTLVTQHPEVIYTNQNVVWSKFKTIFFTISGLIHYAPVFRDYVFRSMQEFYEDNVLYMEIRARLLPVYELSGEHHDEEWSVKTYQEVAQKFVETHPEFIGIKIIYSDHRSKDVAVIAESIRMAMGLRIKFPTVVAGFDLVGHEDTGHSLHDYKEALMIPAKDGVKLPYFFHAGETDWQGTSIDRNILDALMLNTTRIGHGFALSKHPAVRTYSWKKDIPIEVCPISNQVLKLVSDLRNHPVATLMATGHPMVISSDDPAMFGAKGLSYDFYEVFMGIGGMKADLRTLKQLAMNSIKYSTLLESEKNTFMEIWKKRWDKFIADVATK

SEQ ID NO: 137 - protein, 482 aa, synthetic construct
  REGION 1..482: note = human ADA2 E179L, mature numbering
IDETRAHLLLKEKMMRLGGRLVLNTKEELANERLMTLKIAEMKEAMRTLIFPPSMHFFQAKHLIERSQVFNILRMMPKGAALHLHDIGIVTMDWLVRNVTYRPHCHICFTPRGIMQFRFAHPTPRPSEKCSKWILLEDYRKRVQNVTEFDDSLLRNFTLVTQHPEVIYTNQNVVWSKFLTIFFTISGLIHYAPVFRDYVFRSMQEFYEDNVLYMEIRARLLPVYELSGEHHDEEWSVKTYQEVAQKFVETHPEFIGIKIIYSDHRSKDVAVIAESIRMAMGLRIKFPTVVAGFDLVGHEDTGHSLHDYKEALMIPAKDGVKLPYFFHAGETDWQGTSIDRNILDALMLNTTRIGHGFALSKHPAVRTYSWKKDIPIEVCPISNQVLKLVSDLRNHPVATLMATGHPMVISSDDPAMFGAKGLSYDFYEVFMGIGGMKADLRTLKQLAMNSIKYSTLLESEKNTFMEIWKKRWDKFIADVATK

SEQ ID NO: 138 - protein, 482 aa, synthetic construct
  REGION 1..482: note = human ADA2 E179M, mature numbering
IDETRAHLLLKEKMMRLGGRLVLNTKEELANERLMTLKIAEMKEAMRTLIFPPSMHFFQAKHLIERSQVFNILRMMPKGAALHLHDIGIVTMDWLVRNVTYRPHCHICFTPRGIMQFRFAHPTPRPSEKCSKWILLEDYRKRVQNVTEFDDSLLRNFTLVTQHPEVIYTNQNVVWSKFMTIFFTISGLIHYAPVFRDYVFRSMQEFYEDNVLYMEIRARLLPVYELSGEHHDEEWSVKTYQEVAQKFVETHPEFIGIKIIYSDHRSKDVAVIAESIRMAMGLRIKFPTVVAGFDLVGHEDTGHSLHDYKEALMIPAKDGVKLPYFFHAGETDWQGTSIDRNILDALMLNTTRIGHGFALSKHPAVRTYSWKKDIPIEVCPISNQVLKLVSDLRNHPVATLMATGHPMVISSDDPAMFGAKGLSYDFYEVFMGIGGMKADLRTLKQLAMNSIKYSTLLESEKNTFMEIWKKRWDKFIADVATK

SEQ ID NO: 139 - protein, 482 aa, synthetic construct
  REGION 1..482: note = human ADA2 E179N, mature numbering
IDETRAHLLLKEKMMRLGGRLVLNTKEELANERLMTLKIAEMKEAMRTLIFPPSMHFFQAKHLIERSQVFNILRMMPKGAALHLHDIGIVTMDWLVRNVTYRPHCHICFTPRGIMQFRFAHPTPRPSEKCSKWILLEDYRKRVQNVTEFDDSLLRNFTLVTQHPEVIYTNQNVVWSKFNTIFFTISGLIHYAPVFRDYVFRSMQEFYEDNVLYMEIRARLLPVYELSGEHHDEEWSVKTYQEVAQKFVETHPEFIGIKIIYSDHRSKDVAVIAESIRMAMGLRIKFPTVVAGFDLVGHEDTGHSLHDYKEALMIPAKDGVKLPYFFHAGETDWQGTSIDRNILDALMLNTTRIGHGFALSKHPAVRTYSWKKDIPIEVCPISNQVLKLVSDLRNHPVATLMATGHPMVISSDDPAMFGAKGLSYDFYEVFMGIGGMKADLRTLKQLAMNSIKYSTLLESEKNTFMEIWKKRWDKFIADVATK

SEQ ID NO: 140 - protein, 482 aa, synthetic construct
  REGION 1..482: note = human ADA2 E179P, mature numbering
IDETRAHLLLKEKMMRLGGRLVLNTKEELANERLMTLKIAEMKEAMRTLIFPPSMHFFQAKHLIERSQVFNILRMMPKGAALHLHDIGIVTMDWLVRNVTYRPHCHICFTPRGIMQFRFAHPTPRPSEKCSKWILLEDYRKRVQNVTEFDDSLLRNFTLVTQHPEVIYTNQNVVWSKFPTIFFTISGLIHYAPVFRDYVFRSMQEFYEDNVLYMEIRARLLPVYELSGEHHDEEWSVKTYQEVAQKFVETHPEFIGIKIIYSDHRSKDVAVIAESIRMAMGLRIKFPTVVAGFDLVGHEDTGHSLHDYKEALMIPAKDGVKLPYFFHAGETDWQGTSIDRNILDALMLNTTRIGHGFALSKHPAVRTYSWKKDIPIEVCPISNQVLKLVSDLRNHPVATLMATGHPMVISSDDPAMFGAKGLSYDFYEVFMGIGGMKADLRTLKQLAMNSIKYSTLLESEKNTFMEIWKKRWDKFIADVATK

SEQ ID NO: 141 - protein, 482 aa, synthetic construct
  REGION 1..482: note = human ADA2 E179Q, mature numbering
IDETRAHLLLKEKMMRLGGRLVLNTKEELANERLMTLKIAEMKEAMRTLIFPPSMHFFQAKHLIERSQVFNILRMMPKGAALHLHDIGIVTMDWLVRNVTYRPHCHICFTPRGIMQFRFAHPTPRPSEKCSKWILLEDYRKRVQNVTEFDDSLLRNFTLVTQHPEVIYTNQNVVWSKFQTIFFTISGLIHYAPVFRDYVFRSMQEFYEDNVLYMEIRARLLPVYELSGEHHDEEWSVKTYQEVAQKFVETHPEFIGIKIIYSDHRSKDVAVIAESIRMAMGLRIKFPTVVAGFDLVGHEDTGHSLHDYKEALMIPAKDGVKLPYFFHAGETDWQGTSIDRNILDALMLNTTRIGHGFALSKHPAVRTYSWKKDIPIEVCPISNQVLKLVSDLRNHPVATLMATGHPMVISSDDPAMFGAKGLSYDFYEVFMGIGGMKADLRTLKQLAMNSIKYSTLLESEKNTFMEIWKKRWDKFIADVATK

SEQ ID NO: 142 - protein, 482 aa, synthetic construct
  REGION 1..482: note = human ADA2 E179R, mature numbering
IDETRAHLLLKEKMMRLGGRLVLNTKEELANERLMTLKIAEMKEAMRTLIFPPSMHFFQAKHLIERSQVFNILRMMPKGAALHLHDIGIVTMDWLVRNVTYRPHCHICFTPRGIMQFRFAHPTPRPSEKCSKWILLEDYRKRVQNVTEFDDSLLRNFTLVTQHPEVIYTNQNVVWSKFRTIFFTISGLIHYAPVFRDYVFRSMQEFYEDNVLYMEIRARLLPVYELSGEHHDEEWSVKTYQEVAQKFVETHPEFIGIKIIYSDHRSKDVAVIAESIRMAMGLRIKFPTVVAGFDLVGHEDTGHSLHDYKEALMIPAKDGVKLPYFFHAGETDWQGTSIDRNILDALMLNTTRIGHGFALSKHPAVRTYSWKKDIPIEVCPISNQVLKLVSDLRNHPVATLMATGHPMVISSDDPAMFGAKGLSYDFYEVFMGIGGMKADLRTLKQLAMNSIKYSTLLESEKNTFMEIWKKRWDKFIADVATK

SEQ ID NO: 143 - protein, 482 aa, synthetic construct
  REGION 1..482: note = human ADA2 E179W, mature numbering
IDETRAHLLLKEKMMRLGGRLVLNTKEELANERLMTLKIAEMKEAMRTLIFPPSMHFFQAKHLIERSQVFNILRMMPKGAALHLHDIGIVTMDWLVRNVTYRPHCHICFTPRGIMQFRFAHPTPRPSEKCSKWILLEDYRKRVQNVTEFDDSLLRNFTLVTQHPEVIYTNQNVVWSKFWTIFFTISGLIHYAPVFRDYVFRSMQEFYEDNVLYMEIRARLLPVYELSGEHHDEEWSVKTYQEVAQKFVETHPEFIGIKIIYSDHRSKDVAVIAESIRMAMGLRIKFPTVVAGFDLVGHEDTGHSLHDYKEALMIPAKDGVKLPYFFHAGETDWQGTSIDRNILDALMLNTTRIGHGFALSKHPAVRTYSWKKDIPIEVCPISNQVLKLVSDLRNHPVATLMATGHPMVISSDDPAMFGAKGLSYDFYEVFMGIGGMKADLRTLKQLAMNSIKYSTLLESEKNTFMEIWKKRWDKFIADVATK

SEQ ID NO: 144 - protein, 482 aa, synthetic construct
  REGION 1..482: note = human ADA2 E179Y, mature numbering
IDETRAHLLLKEKMMRLGGRLVLNTKEELANERLMTLKIAEMKEAMRTLIFPPSMHFFQAKHLIERSQVFNILRMMPKGAALHLHDIGIVTMDWLVRNVTYRPHCHICFTPRGIMQFRFAHPTPRPSEKCSKWILLEDYRKRVQNVTEFDDSLLRNFTLVTQHPEVIYTNQNVVWSKFYTIFFTISGLIHYAPVFRDYVFRSMQEFYEDNVLYMEIRARLLPVYELSGEHHDEEWSVKTYQEVAQKFVETHPEFIGIKIIYSDHRSKDVAVIAESIRMAMGLRIKFPTVVAGFDLVGHEDTGHSLHDYKEALMIPAKDGVKLPYFFHAGETDWQGTSIDRNILDALMLNTTRIGHGFALSKHPAVRTYSWKKDIPIEVCPISNQVLKLVSDLRNHPVATLMATGHPMVISSDDPAMFGAKGLSYDFYEVFMGIGGMKADLRTLKQLAMNSIKYSTLLESEKNTFMEIWKKRWDKFIADVATK

SEQ ID NO: 145 - protein, 482 aa, synthetic construct
  REGION 1..482: note = human ADA2 R219C, mature numbering
IDETRAHLLLKEKMMRLGGRLVLNTKEELANERLMTLKIAEMKEAMRTLIFPPSMHFFQAKHLIERSQVFNILRMMPKGAALHLHDIGIVTMDWLVRNVTYRPHCHICFTPRGIMQFRFAHPTPRPSEKCSKWILLEDYRKRVQNVTEFDDSLLRNFTLVTQHPEVIYTNQNVVWSKFETIFFTISGLIHYAPVFRDYVFRSMQEFYEDNVLYMEIRACLLPVYELSGEHHDEEWSVKTYQEVAQKFVETHPEFIGIKIIYSDHRSKDVAVIAESIRMAMGLRIKFPTVVAGFDLVGHEDTGHSLHDYKEALMIPAKDGVKLPYFFHAGETDWQGTSIDRNILDALMLNTTRIGHGFALSKHPAVRTYSWKKDIPIEVCPISNQVLKLVSDLRNHPVATLMATGHPMVISSDDPAMFGAKGLSYDFYEVFMGIGGMKADLRTLKQLAMNSIKYSTLLESEKNTFMEIWKKRWDKFIADVATK

SEQ ID NO: 146 - protein, 482 aa, synthetic construct
  REGION 1..482: note = human ADA2 R219D, mature numbering
IDETRAHLLLKEKMMRLGGRLVLNTKEELANERLMTLKIAEMKEAMRTLIFPPSMHFFQAKHLIERSQVFNILRMMPKGAALHLHDIGIVTMDWLVRNVTYRPHCHICFTPRGIMQFRFAHPTPRPSEKCSKWILLEDYRKRVQNVTEFDDSLLRNFTLVTQHPEVIYTNQNVVWSKFETIFFTISGLIHYAPVFRDYVFRSMQEFYEDNVLYMEIRADLLPVYELSGEHHDEEWSVKTYQEVAQKFVETHPEFIGIKIIYSDHRSKDVAVIAESIRMAMGLRIKFPTVVAGFDLVGHEDTGHSLHDYKEALMIPAKDGVKLPYFFHAGETDWQGTSIDRNILDALMLNTTRIGHGFALSKHPAVRTYSWKKDIPIEVCPISNQVLKLVSDLRNHPVATLMATGHPMVISSDDPAMFGAKGLSYDFYEVFMGIGGMKADLRTLKQLAMNSIKYSTLLESEKNTFMEIWKKRWDKFIADVATK

SEQ ID NO: 147 - protein, 482 aa, synthetic construct
  REGION 1..482: note = human ADA2 R219E, mature numbering
IDETRAHLLLKEKMMRLGGRLVLNTKEELANERLMTLKIAEMKEAMRTLIFPPSMHFFQAKHLIERSQVFNILRMMPKGAALHLHDIGIVTMDWLVRNVTYRPHCHICFTPRGIMQFRFAHPTPRPSEKCSKWILLEDYRKRVQNVTEFDDSLLRNFTLVTQHPEVIYTNQNVVWSKFETIFFTISGLIHYAPVFRDYVFRSMQEFYEDNVLYMEIRAELLPVYELSGEHHDEEWSVKTYQEVAQKFVETHPEFIGIKIIYSDHRSKDVAVIAESIRMAMGLRIKFPTVVAGFDLVGHEDTGHSLHDYKEALMIPAKDGVKLPYFFHAGETDWQGTSIDRNILDALMLNTTRIGHGFALSKHPAVRTYSWKKDIPIEVCPISNQVLKLVSDLRNHPVATLMATGHPMVISSDDPAMFGAKGLSYDFYEVFMGIGGMKADLRTLKQLAMNSIKYSTLLESEKNTFMEIWKKRWDKFIADVATK

SEQ ID NO: 148 - protein, 482 aa, synthetic construct
  REGION 1..482: note = human ADA2 R219F, mature numbering
IDETRAHLLLKEKMMRLGGRLVLNTKEELANERLMTLKIAEMKEAMRTLIFPPSMHFFQAKHLIERSQVFNILRMMPKGAALHLHDIGIVTMDWLVRNVTYRPHCHICFTPRGIMQFRFAHPTPRPSEKCSKWILLEDYRKRVQNVTEFDDSLLRNFTLVTQHPEVIYTNQNVVWSKFETIFFTISGLIHYAPVFRDYVFRSMQEFYEDNVLYMEIRAFLLPVYELSGEHHDEEWSVKTYQEVAQKFVETHPEFIGIKIIYSDHRSKDVAVIAESIRMAMGLRIKFPTVVAGFDLVGHEDTGHSLHDYKEALMIPAKDGVKLPYFFHAGETDWQGTSIDRNILDALMLNTTRIGHGFALSKHPAVRTYSWKKDIPIEVCPISNQVLKLVSDLRNHPVATLMATGHPMVISSDDPAMFGAKGLSYDFYEVFMGIGGMKADLRTLKQLAMNSIKYSTLLESEKNTFMEIWKKRWDKFIADVATK

SEQ ID NO: 149 - protein, 482 aa, synthetic construct
  REGION 1..482: note = human ADA2 R219G, mature numbering
IDETRAHLLLKEKMMRLGGRLVLNTKEELANERLMTLKIAEMKEAMRTLIFPPSMHFFQAKHLIERSQVFNILRMMPKGAALHLHDIGIVTMDWLVRNVTYRPHCHICFTPRGIMQFRFAHPTPRPSEKCSKWILLEDYRKRVQNVTEFDDSLLRNFTLVTQHPEVIYTNQNVVWSKFETIFFTISGLIHYAPVFRDYVFRSMQEFYEDNVLYMEIRAGLLPVYELSGEHHDEEWSVKTYQEVAQKFVETHPEFIGIKIIYSDHRSKDVAVIAESIRMAMGLRIKFPTVVAGFDLVGHEDTGHSLHDYKEALMIPAKDGVKLPYFFHAGETDWQGTSIDRNILDALMLNTTRIGHGFALSKHPAVRTYSWKKDIPIEVCPISNQVLKLVSDLRNHPVATLMATGHPMVISSDDPAMFGAKGLSYDFYEVFMGIGGMKADLRTLKQLAMNSIKYSTLLESEKNTFMEIWKKRWDKFIADVATK

SEQ ID NO: 150 - protein, 482 aa, synthetic construct
  REGION 1..482: note = human ADA2 R219H, mature numbering
IDETRAHLLLKEKMMRLGGRLVLNTKEELANERLMTLKIAEMKEAMRTLIFPPSMHFFQAKHLIERSQVFNILRMMPKGAALHLHDIGIVTMDWLVRNVTYRPHCHICFTPRGIMQFRFAHPTPRPSEKCSKWILLEDYRKRVQNVTEFDDSLLRNFTLVTQHPEVIYTNQNVVWSKFETIFFTISGLIHYAPVFRDYVFRSMQEFYEDNVLYMEIRAHLLPVYELSGEHHDEEWSVKTYQEVAQKFVETHPEFIGIKIIYSDHRSKDVAVIAESIRMAMGLRIKFPTVVAGFDLVGHEDTGHSLHDYKEALMIPAKDGVKLPYFFHAGETDWQGTSIDRNILDALMLNTTRIGHGFALSKHPAVRTYSWKKDIPIEVCPISNQVLKLVSDLRNHPVATLMATGHPMVISSDDPAMFGAKGLSYDFYEVFMGIGGMKADLRTLKQLAMNSIKYSTLLESEKNTFMEIWKKRWDKFIADVATK

SEQ ID NO: 151 - protein, 482 aa, synthetic construct
  REGION 1..482: note = human ADA2 R219I, mature numbering
IDETRAHLLLKEKMMRLGGRLVLNTKEELANERLMTLKIAEMKEAMRTLIFPPSMHFFQAKHLIERSQVFNILRMMPKGAALHLHDIGIVTMDWLVRNVTYRPHCHICFTPRGIMQFRFAHPTPRPSEKCSKWILLEDYRKRVQNVTEFDDSLLRNFTLVTQHPEVIYTNQNVVWSKFETIFFTISGLIHYAPVFRDYVFRSMQEFYEDNVLYMEIRAILLPVYELSGEHHDEEWSVKTYQEVAQKFVETHPEFIGIKIIYSDHRSKDVAVIAESIRMAMGLRIKFPTVVAGFDLVGHEDTGHSLHDYKEALMIPAKDGVKLPYFFHAGETDWQGTSIDRNILDALMLNTTRIGHGFALSKHPAVRTYSWKKDIPIEVCPISNQVLKLVSDLRNHPVATLMATGHPMVISSDDPAMFGAKGLSYDFYEVFMGIGGMKADLRTLKQLAMNSIKYSTLLESEKNTFMEIWKKRWDKFIADVATK

SEQ ID NO: 152 - protein, 482 aa, synthetic construct
  REGION 1..482: note = human ADA2 R219L, mature numbering
IDETRAHLLLKEKMMRLGGRLVLNTKEELANERLMTLKIAEMKEAMRTLIFPPSMHFFQAKHLIERSQVFNILRMMPKGAALHLHDIGIVTMDWLVRNVTYRPHCHICFTPRGIMQFRFAHPTPRPSEKCSKWILLEDYRKRVQNVTEFDDSLLRNFTLVTQHPEVIYTNQNVVWSKFETIFFTISGLIHYAPVFRDYVFRSMQEFYEDNVLYMEIRALLLPVYELSGEHHDEEWSVKTYQEVAQKFVETHPEFIGIKIIYSDHRSKDVAVIAESIRMAMGLRIKFPTVVAGFDLVGHEDTGHSLHDYKEALMIPAKDGVKLPYFFHAGETDWQGTSIDRNILDALMLNTTRIGHGFALSKHPAVRTYSWKKDIPIEVCPISNQVLKLVSDLRNHPVATLMATGHPMVISSDDPAMFGAKGLSYDFYEVFMGIGGMKADLRTLKQLAMNSIKYSTLLESEKNTFMEIWKKRWDKFIADVATK

SEQ ID NO: 153 - protein, 482 aa, synthetic construct
  REGION 1..482: note = human ADA2 R219M, mature numbering
IDETRAHLLLKEKMMRLGGRLVLNTKEELANERLMTLKIAEMKEAMRTLIFPPSMHFFQAKHLIERSQVFNILRMMPKGAALHLHDIGIVTMDWLVRNVTYRPHCHICFTPRGIMQFRFAHPTPRPSEKCSKWILLEDYRKRVQNVTEFDDSLLRNFTLVTQHPEVIYTNQNVVWSKFETIFFTISGLIHYAPVFRDYVFRSMQEFYEDNVLYMEIRAMLLPVYELSGEHHDEEWSVKTYQEVAQKFVETHPEFIGIKIIYSDHRSKDVAVIAESIRMAMGLRIKFPTVVAGFDLVGHEDTGHSLHDYKEALMIPAKDGVKLPYFFHAGETDWQGTSIDRNILDALMLNTTRIGHGFALSKHPAVRTYSWKKDIPIEVCPISNQVLKLVSDLRNHPVATLMATGHPMVISSDDPAMFGAKGLSYDFYEVFMGIGGMKADLRTLKQLAMNSIKYSTLLESEKNTFMEIWKKRWDKFIADVATK

SEQ ID NO: 154 - protein, 482 aa, synthetic construct
  REGION 1..482: note = human ADA2 R219P, mature numbering
IDETRAHLLLKEKMMRLGGRLVLNTKEELANERLMTLKIAEMKEAMRTLIFPPSMHFFQAKHLIERSQVFNILRMMPKGAALHLHDIGIVTMDWLVRNVTYRPHCHICFTPRGIMQFRFAHPTPRPSEKCSKWILLEDYRKRVQNVTEFDDSLLRNFTLVTQHPEVIYTNQNVVWSKFETIFFTISGLIHYAPVFRDYVFRSMQEFYEDNVLYMEIRAPLLPVYELSGEHHDEEWSVKTYQEVAQKFVETHPEFIGIKIIYSDHRSKDVAVIAESIRMAMGLRIKFPTVVAGFDLVGHEDTGHSLHDYKEALMIPAKDGVKLPYFFHAGETDWQGTSIDRNILDALMLNTTRIGHGFALSKHPAVRTYSWKKDIPIEVCPISNQVLKLVSDLRNHPVATLMATGHPMVISSDDPAMFGAKGLSYDFYEVFMGIGGMKADLRTLKQLAMNSIKYSTLLESEKNTFMEIWKKRWDKFIADVATK

SEQ ID NO: 155 - protein, 482 aa, synthetic construct
  REGION 1..482: note = human ADA2 R219S, mature numbering
IDETRAHLLLKEKMMRLGGRLVLNTKEELANERLMTLKIAEMKEAMRTLIFPPSMHFFQAKHLIERSQVFNILRMMPKGAALHLHDIGIVTMDWLVRNVTYRPHCHICFTPRGIMQFRFAHPTPRPSEKCSKWILLEDYRKRVQNVTEFDDSLLRNFTLVTQHPEVIYTNQNVVWSKFETIFFTISGLIHYAPVFRDYVFRSMQEFYEDNVLYMEIRASLLPVYELSGEHHDEEWSVKTYQEVAQKFVETHPEFIGIKIIYSDHRSKDVAVIAESIRMAMGLRIKFPTVVAGFDLVGHEDTGHSLHDYKEALMIPAKDGVKLPYFFHAGETDWQGTSIDRNILDALMLNTTRIGHGFALSKHPAVRTYSWKKDIPIEVCPISNQVLKLVSDLRNHPVATLMATGHPMVISSDDPAMFGAKGLSYDFYEVFMGIGGMKADLRTLKQLAMNSIKYSTLLESEKNTFMEIWKKRWDKFIADVATK

SEQ ID NO: 156 - protein, 482 aa, synthetic construct
  REGION 1..482: note = human ADA2 R219T, mature numbering
IDETRAHLLLKEKMMRLGGRLVLNTKEELANERLMTLKIAEMKEAMRTLIFPPSMHFFQAKHLIERSQVFNILRMMPKGAALHLHDIGIVTMDWLVRNVTYRPHCHICFTPRGIMQFRFAHPTPRPSEKCSKWILLEDYRKRVQNVTEFDDSLLRNFTLVTQHPEVIYTNQNVVWSKFETIFFTISGLIHYAPVFRDYVFRSMQEFYEDNVLYMEIRATLLPVYELSGEHHDEEWSVKTYQEVAQKFVETHPEFIGIKIIYSDHRSKDVAVIAESIRMAMGLRIKFPTVVAGFDLVGHEDTGHSLHDYKEALMIPAKDGVKLPYFFHAGETDWQGTSIDRNILDALMLNTTRIGHGFALSKHPAVRTYSWKKDIPIEVCPISNQVLKLVSDLRNHPVATLMATGHPMVISSDDPAMFGAKGLSYDFYEVFMGIGGMKADLRTLKQLAMNSIKYSTLLESEKNTFMEIWKKRWDKFIADVATK

SEQ ID NO: 157 - protein, 482 aa, synthetic construct
  REGION 1..482: note = human ADA2 R219V, mature numbering
IDETRAHLLLKEKMMRLGGRLVLNTKEELANERLMTLKIAEMKEAMRTLIFPPSMHFFQAKHLIERSQVFNILRMMPKGAALHLHDIGIVTMDWLVRNVTYRPHCHICFTPRGIMQFRFAHPTPRPSEKCSKWILLEDYRKRVQNVTEFDDSLLRNFTLVTQHPEVIYTNQNVVWSKFETIFFTISGLIHYAPVFRDYVFRSMQEFYEDNVLYMEIRAVLLPVYELSGEHHDEEWSVKTYQEVAQKFVETHPEFIGIKIIYSDHRSKDVAVIAESIRMAMGLRIKFPTVVAGFDLVGHEDTGHSLHDYKEALMIPAKDGVKLPYFFHAGETDWQGTSIDRNILDALMLNTTRIGHGFALSKHPAVRTYSWKKDIPIEVCPISNQVLKLVSDLRNHPVATLMATGHPMVISSDDPAMFGAKGLSYDFYEVFMGIGGMKADLRTLKQLAMNSIKYSTLLESEKNTFMEIWKKRWDKFIADVATK

SEQ ID NO: 158 - protein, 482 aa, synthetic construct
  REGION 1..482: note = human ADA2 R219W, mature numbering
IDETRAHLLLKEKMMRLGGRLVLNTKEELANERLMTLKIAEMKEAMRTLIFPPSMHFFQAKHLIERSQVFNILRMMPKGAALHLHDIGIVTMDWLVRNVTYRPHCHICFTPRGIMQFRFAHPTPRPSEKCSKWILLEDYRKRVQNVTEFDDSLLRNFTLVTQHPEVIYTNQNVVWSKFETIFFTISGLIHYAPVFRDYVFRSMQEFYEDNVLYMEIRAWLLPVYELSGEHHDEEWSVKTYQEVAQKFVETHPEFIGIKIIYSDHRSKDVAVIAESIRMAMGLRIKFPTVVAGFDLVGHEDTGHSLHDYKEALMIPAKDGVKLPYFFHAGETDWQGTSIDRNILDALMLNTTRIGHGFALSKHPAVRTYSWKKDIPIEVCPISNQVLKLVSDLRNHPVATLMATGHPMVISSDDPAMFGAKGLSYDFYEVFMGIGGMKADLRTLKQLAMNSIKYSTLLESEKNTFMEIWKKRWDKFIADVATK

SEQ ID NO: 159 - protein, 482 aa, synthetic construct
  REGION 1..482: note = human ADA2 R219Y, mature numbering
IDETRAHLLLKEKMMRLGGRLVLNTKEELANERLMTLKIAEMKEAMRTLIFPPSMHFFQAKHLIERSQVFNILRMMPKGAALHLHDIGIVTMDWLVRNVTYRPHCHICFTPRGIMQFRFAHPTPRPSEKCSKWILLEDYRKRVQNVTEFDDSLLRNFTLVTQHPEVIYTNQNVVWSKFETIFFTISGLIHYAPVFRDYVFRSMQEFYEDNVLYMEIRAYLLPVYELSGEHHDEEWSVKTYQEVAQKFVETHPEFIGIKIIYSDHRSKDVAVIAESIRMAMGLRIKFPTVVAGFDLVGHEDTGHSLHDYKEALMIPAKDGVKLPYFFHAGETDWQGTSIDRNILDALMLNTTRIGHGFALSKHPAVRTYSWKKDIPIEVCPISNQVLKLVSDLRNHPVATLMATGHPMVISSDDPAMFGAKGLSYDFYEVFMGIGGMKADLRTLKQLAMNSIKYSTLLESEKNTFMEIWKKRWDKFIADVATK

SEQ ID NO: 160 - protein, 482 aa, synthetic construct
  REGION 1..482: note = human ADA2 L221C, mature numbering
IDETRAHLLLKEKMMRLGGRLVLNTKEELANERLMTLKIAEMKEAMRTLIFPPSMHFFQAKHLIERSQVFNILRMMPKGAALHLHDIGIVTMDWLVRNVTYRPHCHICFTPRGIMQFRFAHPTPRPSEKCSKWILLEDYRKRVQNVTEFDDSLLRNFTLVTQHPEVIYTNQNVVWSKFETIFFTISGLIHYAPVFRDYVFRSMQEFYEDNVLYMEIRARLCPVYELSGEHHDEEWSVKTYQEVAQKFVETHPEFIGIKIIYSDHRSKDVAVIAESIRMAMGLRIKFPTVVAGFDLVGHEDTGHSLHDYKEALMIPAKDGVKLPYFFHAGETDWQGTSIDRNILDALMLNTTRIGHGFALSKHPAVRTYSWKKDIPIEVCPISNQVLKLVSDLRNHPVATLMATGHPMVISSDDPAMFGAKGLSYDFYEVFMGIGGMKADLRTLKQLAMNSIKYSTLLESEKNTFMEIWKKRWDKFIADVATK

SEQ ID NO: 161 - protein, 482 aa, synthetic construct
  REGION 1..482: note = human ADA2 L221D, mature numbering
IDETRAHLLLKEKMMRLGGRLVLNTKEELANERLMTLKIAEMKEAMRTLIFPPSMHFFQAKHLIERSQVFNILRMMPKGAALHLHDIGIVTMDWLVRNVTYRPHCHICFTPRGIMQFRFAHPTPRPSEKCSKWILLEDYRKRVQNVTEFDDSLLRNFTLVTQHPEVIYTNQNVVWSKFETIFFTISGLIHYAPVFRDYVFRSMQEFYEDNVLYMEIRARLDPVYELSGEHHDEEWSVKTYQEVAQKFVETHPEFIGIKIIYSDHRSKDVAVIAESIRMAMGLRIKFPTVVAGFDLVGHEDTGHSLHDYKEALMIPAKDGVKLPYFFHAGETDWQGTSIDRNILDALMLNTTRIGHGFALSKHPAVRTYSWKKDIPIEVCPISNQVLKLVSDLRNHPVATLMATGHPMVISSDDPAMFGAKGLSYDFYEVFMGIGGMKADLRTLKQLAMNSIKYSTLLESEKNTFMEIWKKRWDKFIADVATK

SEQ ID NO: 162 - protein, 482 aa, synthetic construct
  REGION 1..482: note = human ADA2 L221E, mature numbering
IDETRAHLLLKEKMMRLGGRLVLNTKEELANERLMTLKIAEMKEAMRTLIFPPSMHFFQAKHLIERSQVFNILRMMPKGAALHLHDIGIVTMDWLVRNVTYRPHCHICFTPRGIMQFRFAHPTPRPSEKCSKWILLEDYRKRVQNVTEFDDSLLRNFTLVTQHPEVIYTNQNVVWSKFETIFFTISGLIHYAPVFRDYVFRSMQEFYEDNVLYMEIRARLEPVYELSGEHHDEEWSVKTYQEVAQKFVETHPEFIGIKIIYSDHRSKDVAVIAESIRMAMGLRIKFPTVVAGFDLVGHEDTGHSLHDYKEALMIPAKDGVKLPYFFHAGETDWQGTSIDRNILDALMLNTTRIGHGFALSKHPAVRTYSWKKDIPIEVCPISNQVLKLVSDLRNHPVATLMATGHPMVISSDDPAMFGAKGLSYDFYEVFMGIGGMKADLRTLKQLAMNSIKYSTLLESEKNTFMEIWKKRWDKFIADVATK

SEQ ID NO: 163 - protein, 482 aa, synthetic construct
  REGION 1..482: note = human ADA2 L221F, mature numbering
IDETRAHLLLKEKMMRLGGRLVLNTKEELANERLMTLKIAEMKEAMRTLIFPPSMHFFQAKHLIERSQVFNILRMMPKGAALHLHDIGIVTMDWLVRNVTYRPHCHICFTPRGIMQFRFAHPTPRPSEKCSKWILLEDYRKRVQNVTEFDDSLLRNFTLVTQHPEVIYTNQNVVWSKFETIFFTISGLIHYAPVFRDYVFRSMQEFYEDNVLYMEIRARLFPVYELSGEHHDEEWSVKTYQEVAQKFVETHPEFIGIKIIYSDHRSKDVAVIAESIRMAMGLRIKFPTVVAGFDLVGHEDTGHSLHDYKEALMIPAKDGVKLPYFFHAGETDWQGTSIDRNILDALMLNTTRIGHGFALSKHPAVRTYSWKKDIPIEVCPISNQVLKLVSDLRNHPVATLMATGHPMVISSDDPAMFGAKGLSYDFYEVFMGIGGMKADLRTLKQLAMNSIKYSTLLESEKNTFMEIWKKRWDKFIADVATK

SEQ ID NO: 164 - protein, 482 aa, synthetic construct
  REGION 1..482: note = human ADA2 L221H, mature numbering
IDETRAHLLLKEKMMRLGGRLVLNTKEELANERLMTLKIAEMKEAMRTLIFPPSMHFFQAKHLIERSQVFNILRMMPKGAALHLHDIGIVTMDWLVRNVTYRPHCHICFTPRGIMQFRFAHPTPRPSEKCSKWILLEDYRKRVQNVTEFDDSLLRNFTLVTQHPEVIYTNQNVVWSKFETIFFTISGLIHYAPVFRDYVFRSMQEFYEDNVLYMEIRARLHPVYELSGEHHDEEWSVKTYQEVAQKFVETHPEFIGIKIIYSDHRSKDVAVIAESIRMAMGLRIKFPTVVAGFDLVGHEDTGHSLHDYKEALMIPAKDGVKLPYFFHAGETDWQGTSIDRNILDALMLNTTRIGHGFALSKHPAVRTYSWKKDIPIEVCPISNQVLKLVSDLRNHPVATLMATGHPMVISSDDPAMFGAKGLSYDFYEVFMGIGGMKADLRTLKQLAMNSIKYSTLLESEKNTFMEIWKKRWDKFIADVATK

SEQ ID NO: 165 - protein, 482 aa, synthetic construct
  REGION 1..482: note = human ADA2 L221I, mature numbering
IDETRAHLLLKEKMMRLGGRLVLNTKEELANERLMTLKIAEMKEAMRTLIFPPSMHFFQAKHLIERSQVFNILRMMPKGAALHLHDIGIVTMDWLVRNVTYRPHCHICFTPRGIMQFRFAHPTPRPSEKCSKWILLEDYRKRVQNVTEFDDSLLRNFTLVTQHPEVIYTNQNVVWSKFETIFFTISGLIHYAPVFRDYVFRSMQEFYEDNVLYMEIRARLIPVYELSGEHHDEEWSVKTYQEVAQKFVETHPEFIGIKIIYSDHRSKDVAVIAESIRMAMGLRIKFPTVVAGFDLVGHEDTGHSLHDYKEALMIPAKDGVKLPYFFHAGETDWQGTSIDRNILDALMLNTTRIGHGFALSKHPAVRTYSWKKDIPIEVCPISNQVLKLVSDLRNHPVATLMATGHPMVISSDDPAMFGAKGLSYDFYEVFMGIGGMKADLRTLKQLAMNSIKYSTLLESEKNTFMEIWKKRWDKFIADVATK

SEQ ID NO: 166 - protein, 482 aa, synthetic construct
  REGION 1..482: note = human ADA2 L221K, mature numbering
IDETRAHLLLKEKMMRLGGRLVLNTKEELANERLMTLKIAEMKEAMRTLIFPPSMHFFQAKHLIERSQVFNILRMMPKGAALHLHDIGIVTMDWLVRNVTYRPHCHICFTPRGIMQFRFAHPTPRPSEKCSKWILLEDYRKRVQNVTEFDDSLLRNFTLVTQHPEVIYTNQNVVWSKFETIFFTISGLIHYAPVFRDYVFRSMQEFYEDNVLYMEIRARLKPVYELSGEHHDEEWSVKTYQEVAQKFVETHPEFIGIKIIYSDHRSKDVAVIAESIRMAMGLRIKFPTVVAGFDLVGHEDTGHSLHDYKEALMIPAKDGVKLPYFFHAGETDWQGTSIDRNILDALMLNTTRIGHGFALSKHPAVRTYSWKKDIPIEVCPISNQVLKLVSDLRNHPVATLMATGHPMVISSDDPAMFGAKGLSYDFYEVFMGIGGMKADLRTLKQLAMNSIKYSTLLESEKNTFMEIWKKRWDKFIADVATK

SEQ ID NO: 167 - protein, 482 aa, synthetic construct
  REGION 1..482: note = human ADA2 L221M, mature numbering
IDETRAHLLLKEKMMRLGGRLVLNTKEELANERLMTLKIAEMKEAMRTLIFPPSMHFFQAKHLIERSQVFNILRMMPKGAALHLHDIGIVTMDWLVRNVTYRPHCHICFTPRGIMQFRFAHPTPRPSEKCSKWILLEDYRKRVQNVTEFDDSLLRNFTLVTQHPEVIYTNQNVVWSKFETIFFTISGLIHYAPVFRDYVFRSMQEFYEDNVLYMEIRARLMPVYELSGEHHDEEWSVKTYQEVAQKFVETHPEFIGIKIIYSDHRSKDVAVIAESIRMAMGLRIKFPTVVAGFDLVGHEDTGHSLHDYKEALMIPAKDGVKLPYFFHAGETDWQGTSIDRNILDALMLNTTRIGHGFALSKHPAVRTYSWKKDIPIEVCPISNQVLKLVSDLRNHPVATLMATGHPMVISSDDPAMFGAKGLSYDFYEVFMGIGGMKADLRTLKQLAMNSIKYSTLLESEKNTFMEIWKKRWDKFIADVATK

SEQ ID NO: 168 - protein, 482 aa, synthetic construct
  REGION 1..482: note = human ADA2 L221N, mature numbering
IDETRAHLLLKEKMMRLGGRLVLNTKEELANERLMTLKIAEMKEAMRTLIFPPSMHFFQAKHLIERSQVFNILRMMPKGAALHLHDIGIVTMDWLVRNVTYRPHCHICFTPRGIMQFRFAHPTPRPSEKCSKWILLEDYRKRVQNVTEFDDSLLRNFTLVTQHPEVIYTNQNVVWSKFETIFFTISGLIHYAPVFRDYVFRSMQEFYEDNVLYMEIRARLNPVYELSGEHHDEEWSVKTYQEVAQKFVETHPEFIGIKIIYSDHRSKDVAVIAESIRMAMGLRIKFPTVVAGFDLVGHEDTGHSLHDYKEALMIPAKDGVKLPYFFHAGETDWQGTSIDRNILDALMLNTTRIGHGFALSKHPAVRTYSWKKDIPIEVCPISNQVLKLVSDLRNHPVATLMATGHPMVISSDDPAMFGAKGLSYDFYEVFMGIGGMKADLRTLKQLAMNSIKYSTLLESEKNTFMEIWKKRWDKFIADVATK

SEQ ID NO: 169 - protein, 482 aa, synthetic construct
  REGION 1..482: note = human ADA2 L221P, mature numbering
IDETRAHLLLKEKMMRLGGRLVLNTKEELANERLMTLKIAEMKEAMRTLIFPPSMHFFQAKHLIERSQVFNILRMMPKGAALHLHDIGIVTMDWLVRNVTYRPHCHICFTPRGIMQFRFAHPTPRPSEKCSKWILLEDYRKRVQNVTEFDDSLLRNFTLVTQHPEVIYTNQNVVWSKFETIFFTISGLIHYAPVFRDYVFRSMQEFYEDNVLYMEIRARLPPVYELSGEHHDEEWSVKTYQEVAQKFVETHPEFIGIKIIYSDHRSKDVAVIAESIRMAMGLRIKFPTVVAGFDLVGHEDTGHSLHDYKEALMIPAKDGVKLPYFFHAGETDWQGTSIDRNILDALMLNTTRIGHGFALSKHPAVRTYSWKKDIPIEVCPISNQVLKLVSDLRNHPVATLMATGHPMVISSDDPAMFGAKGLSYDFYEVFMGIGGMKADLRTLKQLAMNSIKYSTLLESEKNTFMEIWKKRWDKFIADVATK

SEQ ID NO: 170 - protein, 482 aa, synthetic construct
  REGION 1..482: note = human ADA2 L221Q, mature numbering
IDETRAHLLLKEKMMRLGGRLVLNTKEELANERLMTLKIAEMKEAMRTLIFPPSMHFFQAKHLIERSQVFNILRMMPKGAALHLHDIGIVTMDWLVRNVTYRPHCHICFTPRGIMQFRFAHPTPRPSEKCSKWILLEDYRKRVQNVTEFDDSLLRNFTLVTQHPEVIYTNQNVVWSKFETIFFTISGLIHYAPVFRDYVFRSMQEFYEDNVLYMEIRARLQPVYELSGEHHDEEWSVKTYQEVAQKFVETHPEFIGIKIIYSDHRSKDVAVIAESIRMAMGLRIKFPTVVAGFDLVGHEDTGHSLHDYKEALMIPAKDGVKLPYFFHAGETDWQGTSIDRNILDALMLNTTRIGHGFALSKHPAVRTYSWKKDIPIEVCPISNQVLKLVSDLRNHPVATLMATGHPMVISSDDPAMFGAKGLSYDFYEVFMGIGGMKADLRTLKQLAMNSIKYSTLLESEKNTFMEIWKKRWDKFIADVATK

SEQ ID NO: 171 - protein, 482 aa, synthetic construct
  REGION 1..482: note = human ADA2 L221R, mature numbering
IDETRAHLLLKEKMMRLGGRLVLNTKEELANERLMTLKIAEMKEAMRTLIFPPSMHFFQAKHLIERSQVFNILRMMPKGAALHLHDIGIVTMDWLVRNVTYRPHCHICFTPRGIMQFRFAHPTPRPSEKCSKWILLEDYRKRVQNVTEFDDSLLRNFTLVTQHPEVIYTNQNVVWSKFETIFFTISGLIHYAPVFRDYVFRSMQEFYEDNVLYMEIRARLRPVYELSGEHHDEEWSVKTYQEVAQKFVETHPEFIGIKIIYSDHRSKDVAVIAESIRMAMGLRIKFPTVVAGFDLVGHEDTGHSLHDYKEALMIPAKDGVKLPYFFHAGETDWQGTSIDRNILDALMLNTTRIGHGFALSKHPAVRTYSWKKDIPIEVCPISNQVLKLVSDLRNHPVATLMATGHPMVISSDDPAMFGAKGLSYDFYEVFMGIGGMKADLRTLKQLAMNSIKYSTLLESEKNTFMEIWKKRWDKFIADVATK

SEQ ID NO: 172 - protein, 482 aa, synthetic construct
  REGION 1..482: note = human ADA2 L221S, mature numbering
IDETRAHLLLKEKMMRLGGRLVLNTKEELANERLMTLKIAEMKEAMRTLIFPPSMHFFQAKHLIERSQVFNILRMMPKGAALHLHDIGIVTMDWLVRNVTYRPHCHICFTPRGIMQFRFAHPTPRPSEKCSKWILLEDYRKRVQNVTEFDDSLLRNFTLVTQHPEVIYTNQNVVWSKFETIFFTISGLIHYAPVFRDYVFRSMQEFYEDNVLYMEIRARLSPVYELSGEHHDEEWSVKTYQEVAQKFVETHPEFIGIKIIYSDHRSKDVAVIAESIRMAMGLRIKFPTVVAGFDLVGHEDTGHSLHDYKEALMIPAKDGVKLPYFFHAGETDWQGTSIDRNILDALMLNTTRIGHGFALSKHPAVRTYSWKKDIPIEVCPISNQVLKLVSDLRNHPVATLMATGHPMVISSDDPAMFGAKGLSYDFYEVFMGIGGMKADLRTLKQLAMNSIKYSTLLESEKNTFMEIWKKRWDKFIADVATK

SEQ ID NO: 173 - protein, 482 aa, synthetic construct
  REGION 1..482: note = human ADA2 L221T, mature numbering
IDETRAHLLLKEKMMRLGGRLVLNTKEELANERLMTLKIAEMKEAMRTLIFPPSMHFFQAKHLIERSQVFNILRMMPKGAALHLHDIGIVTMDWLVRNVTYRPHCHICFTPRGIMQFRFAHPTPRPSEKCSKWILLEDYRKRVQNVTEFDDSLLRNFTLVTQHPEVIYTNQNVVWSKFETIFFTISGLIHYAPVFRDYVFRSMQEFYEDNVLYMEIRARLTPVYELSGEHHDEEWSVKTYQEVAQKFVETHPEFIGIKIIYSDHRSKDVAVIAESIRMAMGLRIKFPTVVAGFDLVGHEDTGHSLHDYKEALMIPAKDGVKLPYFFHAGETDWQGTSIDRNILDALMLNTTRIGHGFALSKHPAVRTYSWKKDIPIEVCPISNQVLKLVSDLRNHPVATLMATGHPMVISSDDPAMFGAKGLSYDFYEVFMGIGGMKADLRTLKQLAMNSIKYSTLLESEKNTFMEIWKKRWDKFIADVATK

SEQ ID NO: 174 - protein, 482 aa, synthetic construct
  REGION 1..482: note = human ADA2 L221W, mature numbering
IDETRAHLLLKEKMMRLGGRLVLNTKEELANERLMTLKIAEMKEAMRTLIFPPSMHFFQAKHLIERSQVFNILRMMPKGAALHLHDIGIVTMDWLVRNVTYRPHCHICFTPRGIMQFRFAHPTPRPSEKCSKWILLEDYRKRVQNVTEFDDSLLRNFTLVTQHPEVIYTNQNVVWSKFETIFFTISGLIHYAPVFRDYVFRSMQEFYEDNVLYMEIRARLWPVYELSGEHHDEEWSVKTYQEVAQKFVETHPEFIGIKIIYSDHRSKDVAVIAESIRMAMGLRIKFPTVVAGFDLVGHEDTGHSLHDYKEALMIPAKDGVKLPYFFHAGETDWQGTSIDRNILDALMLNTTRIGHGFALSKHPAVRTYSWKKDIPIEVCPISNQVLKLVSDLRNHPVATLMATGHPMVISSDDPAMFGAKGLSYDFYEVFMGIGGMKADLRTLKQLAMNSIKYSTLLESEKNTFMEIWKKRWDKFIADVATK

SEQ ID NO: 175 - protein, 482 aa, synthetic construct
  REGION 1..482: note = human ADA2 L221Y, mature numbering
IDETRAHLLLKEKMMRLGGRLVLNTKEELANERLMTLKIAEMKEAMRTLIFPPSMHFFQAKHLIERSQVFNILRMMPKGAALHLHDIGIVTMDWLVRNVTYRPHCHICFTPRGIMQFRFAHPTPRPSEKCSKWILLEDYRKRVQNVTEFDDSLLRNFTLVTQHPEVIYTNQNVVWSKFETIFFTISGLIHYAPVFRDYVFRSMQEFYEDNVLYMEIRARLYPVYELSGEHHDEEWSVKTYQEVAQKFVETHPEFIGIKIIYSDHRSKDVAVIAESIRMAMGLRIKFPTVVAGFDLVGHEDTGHSLHDYKEALMIPAKDGVKLPYFFHAGETDWQGTSIDRNILDALMLNTTRIGHGFALSKHPAVRTYSWKKDIPIEVCPISNQVLKLVSDLRNHPVATLMATGHPMVISSDDPAMFGAKGLSYDFYEVFMGIGGMKADLRTLKQLAMNSIKYSTLLESEKNTFMEIWKKRWDKFIADVATK

SEQ ID NO: 176 - protein, 482 aa, synthetic construct
  REGION 1..482: note = human ADA2 S262C, mature numbering
IDETRAHLLLKEKMMRLGGRLVLNTKEELANERLMTLKIAEMKEAMRTLIFPPSMHFFQAKHLIERSQVFNILRMMPKGAALHLHDIGIVTMDWLVRNVTYRPHCHICFTPRGIMQFRFAHPTPRPSEKCSKWILLEDYRKRVQNVTEFDDSLLRNFTLVTQHPEVIYTNQNVVWSKFETIFFTISGLIHYAPVFRDYVFRSMQEFYEDNVLYMEIRARLLPVYELSGEHHDEEWSVKTYQEVAQKFVETHPEFIGIKIIYCDHRSKDVAVIAESIRMAMGLRIKFPTVVAGFDLVGHEDTGHSLHDYKEALMIPAKDGVKLPYFFHAGETDWQGTSIDRNILDALMLNTTRIGHGFALSKHPAVRTYSWKKDIPIEVCPISNQVLKLVSDLRNHPVATLMATGHPMVISSDDPAMFGAKGLSYDFYEVFMGIGGMKADLRTLKQLAMNSIKYSTLLESEKNTFMEIWKKRWDKFIADVATK

SEQ ID NO: 177 - protein, 482 aa, synthetic construct
  REGION 1..482: note = human ADA2 S262D, mature numbering
IDETRAHLLLKEKMMRLGGRLVLNTKEELANERLMTLKIAEMKEAMRTLIFPPSMHFFQAKHLIERSQVFNILRMMPKGAALHLHDIGIVTMDWLVRNVTYRPHCHICFTPRGIMQFRFAHPTPRPSEKCSKWILLEDYRKRVQNVTEFDDSLLRNFTLVTQHPEVIYTNQNVVWSKFETIFFTISGLIHYAPVFRDYVFRSMQEFYEDNVLYMEIRARLLPVYELSGEHHDEEWSVKTYQEVAQKFVETHPEFIGIKIIYDDHRSKDVAVIAESIRMAMGLRIKFPTVVAGFDLVGHEDTGHSLHDYKEALMIPAKDGVKLPYFFHAGETDWQGTSIDRNILDALMLNTTRIGHGFALSKHPAVRTYSWKKDIPIEVCPISNQVLKLVSDLRNHPVATLMATGHPMVISSDDPAMFGAKGLSYDFYEVFMGIGGMKADLRTLKQLAMNSIKYSTLLESEKNTFMEIWKKRWDKFIADVATK

SEQ ID NO: 178 - protein, 482 aa, synthetic construct
  REGION 1..482: note = human ADA2 S262E, mature numbering
IDETRAHLLLKEKMMRLGGRLVLNTKEELANERLMTLKIAEMKEAMRTLIFPPSMHFFQAKHLIERSQVFNILRMMPKGAALHLHDIGIVTMDWLVRNVTYRPHCHICFTPRGIMQFRFAHPTPRPSEKCSKWILLEDYRKRVQNVTEFDDSLLRNFTLVTQHPEVIYTNQNVVWSKFETIFFTISGLIHYAPVFRDYVFRSMQEFYEDNVLYMEIRARLLPVYELSGEHHDEEWSVKTYQEVAQKFVETHPEFIGIKIIYEDHRSKDVAVIAESIRMAMGLRIKFPTVVAGFDLVGHEDTGHSLHDYKEALMIPAKDGVKLPYFFHAGETDWQGTSIDRNILDALMLNTTRIGHGFALSKHPAVRTYSWKKDIPIEVCPISNQVLKLVSDLRNHPVATLMATGHPMVISSDDPAMFGAKGLSYDFYEVFMGIGGMKADLRTLKQLAMNSIKYSTLLESEKNTFMEIWKKRWDKFIADVATK

SEQ ID NO: 179 - protein, 482 aa, synthetic construct
  REGION 1..482: note = human ADA2 S262F, mature numbering
IDETRAHLLLKEKMMRLGGRLVLNTKEELANERLMTLKIAEMKEAMRTLIFPPSMHFFQAKHLIERSQVFNILRMMPKGAALHLHDIGIVTMDWLVRNVTYRPHCHICFTPRGIMQFRFAHPTPRPSEKCSKWILLEDYRKRVQNVTEFDDSLLRNFTLVTQHPEVIYTNQNVVWSKFETIFFTISGLIHYAPVFRDYVFRSMQEFYEDNVLYMEIRARLLPVYELSGEHHDEEWSVKTYQEVAQKFVETHPEFIGIKIIYFDHRSKDVAVIAESIRMAMGLRIKFPTVVAGFDLVGHEDTGHSLHDYKEALMIPAKDGVKLPYFFHAGETDWQGTSIDRNILDALMLNTTRIGHGFALSKHPAVRTYSWKKDIPIEVCPISNQVLKLVSDLRNHPVATLMATGHPMVISSDDPAMFGAKGLSYDFYEVFMGIGGMKADLRTLKQLAMNSIKYSTLLESEKNTFMEIWKKRWDKFIADVATK

SEQ ID NO: 180 - protein, 482 aa, synthetic construct
  REGION 1..482: note = human ADA2 S262G, mature numbering
IDETRAHLLLKEKMMRLGGRLVLNTKEELANERLMTLKIAEMKEAMRTLIFPPSMHFFQAKHLIERSQVFNILRMMPKGAALHLHDIGIVTMDWLVRNVTYRPHCHICFTPRGIMQFRFAHPTPRPSEKCSKWILLEDYRKRVQNVTEFDDSLLRNFTLVTQHPEVIYTNQNVVWSKFETIFFTISGLIHYAPVFRDYVFRSMQEFYEDNVLYMEIRARLLPVYELSGEHHDEEWSVKTYQEVAQKFVETHPEFIGIKIIYGDHRSKDVAVIAESIRMAMGLRIKFPTVVAGFDLVGHEDTGHSLHDYKEALMIPAKDGVKLPYFFHAGETDWQGTSIDRNILDALMLNTTRIGHGFALSKHPAVRTYSWKKDIPIEVCPISNQVLKLVSDLRNHPVATLMATGHPMVISSDDPAMFGAKGLSYDFYEVFMGIGGMKADLRTLKQLAMNSIKYSTLLESEKNTFMEIWKKRWDKFIADVATK

SEQ ID NO: 181 - protein, 482 aa, synthetic construct
  REGION 1..482: note = human ADA2 S262H, mature numbering
IDETRAHLLLKEKMMRLGGRLVLNTKEELANERLMTLKIAEMKEAMRTLIFPPSMHFFQAKHLIERSQVFNILRMMPKGAALHLHDIGIVTMDWLVRNVTYRPHCHICFTPRGIMQFRFAHPTPRPSEKCSKWILLEDYRKRVQNVTEFDDSLLRNFTLVTQHPEVIYTNQNVVWSKFETIFFTISGLIHYAPVFRDYVFRSMQEFYEDNVLYMEIRARLLPVYELSGEHHDEEWSVKTYQEVAQKFVETHPEFIGIKIIYHDHRSKDVAVIAESIRMAMGLRIKFPTVVAGFDLVGHEDTGHSLHDYKEALMIPAKDGVKLPYFFHAGETDWQGTSIDRNILDALMLNTTRIGHGFALSKHPAVRTYSWKKDIPIEVCPISNQVLKLVSDLRNHPVATLMATGHPMVISSDDPAMFGAKGLSYDFYEVFMGIGGMKADLRTLKQLAMNSIKYSTLLESEKNTFMEIWKKRWDKFIADVATK

SEQ ID NO: 182 - protein, 482 aa, synthetic construct
  REGION 1..482: note = human ADA2 S262I, mature numbering
IDETRAHLLLKEKMMRLGGRLVLNTKEELANERLMTLKIAEMKEAMRTLIFPPSMHFFQAKHLIERSQVFNILRMMPKGAALHLHDIGIVTMDWLVRNVTYRPHCHICFTPRGIMQFRFAHPTPRPSEKCSKWILLEDYRKRVQNVTEFDDSLLRNFTLVTQHPEVIYTNQNVVWSKFETIFFTISGLIHYAPVFRDYVFRSMQEFYEDNVLYMEIRARLLPVYELSGEHHDEEWSVKTYQEVAQKFVETHPEFIGIKIIYIDHRSKDVAVIAESIRMAMGLRIKFPTVVAGFDLVGHEDTGHSLHDYKEALMIPAKDGVKLPYFFHAGETDWQGTSIDRNILDALMLNTTRIGHGFALSKHPAVRTYSWKKDIPIEVCPISNQVLKLVSDLRNHPVATLMATGHPMVISSDDPAMFGAKGLSYDFYEVFMGIGGMKADLRTLKQLAMNSIKYSTLLESEKNTFMEIWKKRWDKFIADVATK

SEQ ID NO: 183 - protein, 482 aa, synthetic construct
  REGION 1..482: note = human ADA2 S262K, mature numbering
IDETRAHLLLKEKMMRLGGRLVLNTKEELANERLMTLKIAEMKEAMRTLIFPPSMHFFQAKHLIERSQVFNILRMMPKGAALHLHDIGIVTMDWLVRNVTYRPHCHICFTPRGIMQFRFAHPTPRPSEKCSKWILLEDYRKRVQNVTEFDDSLLRNFTLVTQHPEVIYTNQNVVWSKFETIFFTISGLIHYAPVFRDYVFRSMQEFYEDNVLYMEIRARLLPVYELSGEHHDEEWSVKTYQEVAQKFVETHPEFIGIKIIYKDHRSKDVAVIAESIRMAMGLRIKFPTVVAGFDLVGHEDTGHSLHDYKEALMIPAKDGVKLPYFFHAGETDWQGTSIDRNILDALMLNTTRIGHGFALSKHPAVRTYSWKKDIPIEVCPISNQVLKLVSDLRNHPVATLMATGHPMVISSDDPAMFGAKGLSYDFYEVFMGIGGMKADLRTLKQLAMNSIKYSTLLESEKNTFMEIWKKRWDKFIADVATK

SEQ ID NO: 184 - protein, 482 aa, synthetic construct
  REGION 1..482: note = human ADA2 S262L, mature numbering
IDETRAHLLLKEKMMRLGGRLVLNTKEELANERLMTLKIAEMKEAMRTLIFPPSMHFFQAKHLIERSQVFNILRMMPKGAALHLHDIGIVTMDWLVRNVTYRPHCHICFTPRGIMQFRFAHPTPRPSEKCSKWILLEDYRKRVQNVTEFDDSLLRNFTLVTQHPEVIYTNQNVVWSKFETIFFTISGLIHYAPVFRDYVFRSMQEFYEDNVLYMEIRARLLPVYELSGEHHDEEWSVKTYQEVAQKFVETHPEFIGIKIIYLDHRSKDVAVIAESIRMAMGLRIKFPTVVAGFDLVGHEDTGHSLHDYKEALMIPAKDGVKLPYFFHAGETDWQGTSIDRNILDALMLNTTRIGHGFALSKHPAVRTYSWKKDIPIEVCPISNQVLKLVSDLRNHPVATLMATGHPMVISSDDPAMFGAKGLSYDFYEVFMGIGGMKADLRTLKQLAMNSIKYSTLLESEKNTFMEIWKKRWDKFIADVATK

SEQ ID NO: 185 - protein, 482 aa, synthetic construct
  REGION 1..482: note = human ADA2 S262P, mature numbering
IDETRAHLLLKEKMMRLGGRLVLNTKEELANERLMTLKIAEMKEAMRTLIFPPSMHFFQAKHLIERSQVFNILRMMPKGAALHLHDIGIVTMDWLVRNVTYRPHCHICFTPRGIMQFRFAHPTPRPSEKCSKWILLEDYRKRVQNVTEFDDSLLRNFTLVTQHPEVIYTNQNVVWSKFETIFFTISGLIHYAPVFRDYVFRSMQEFYEDNVLYMEIRARLLPVYELSGEHHDEEWSVKTYQEVAQKFVETHPEFIGIKIIYPDHRSKDVAVIAESIRMAMGLRIKFPTVVAGFDLVGHEDTGHSLHDYKEALMIPAKDGVKLPYFFHAGETDWQGTSIDRNILDALMLNTTRIGHGFALSKHPAVRTYSWKKDIPIEVCPISNQVLKLVSDLRNHPVATLMATGHPMVISSDDPAMFGAKGLSYDFYEVFMGIGGMKADLRTLKQLAMNSIKYSTLLESEKNTFMEIWKKRWDKFIADVATK

SEQ ID NO: 186 - protein, 482 aa, synthetic construct
  REGION 1..482: note = human ADA2 S262Q, mature numbering
IDETRAHLLLKEKMMRLGGRLVLNTKEELANERLMTLKIAEMKEAMRTLIFPPSMHFFQAKHLIERSQVFNILRMMPKGAALHLHDIGIVTMDWLVRNVTYRPHCHICFTPRGIMQFRFAHPTPRPSEKCSKWILLEDYRKRVQNVTEFDDSLLRNFTLVTQHPEVIYTNQNVVWSKFETIFFTISGLIHYAPVFRDYVFRSMQEFYEDNVLYMEIRARLLPVYELSGEHHDEEWSVKTYQEVAQKFVETHPEFIGIKIIYQDHRSKDVAVIAESIRMAMGLRIKFPTVVAGFDLVGHEDTGHSLHDYKEALMIPAKDGVKLPYFFHAGETDWQGTSIDRNILDALMLNTTRIGHGFALSKHPAVRTYSWKKDIPIEVCPISNQVLKLVSDLRNHPVATLMATGHPMVISSDDPAMFGAKGLSYDFYEVFMGIGGMKADLRTLKQLAMNSIKYSTLLESEKNTFMEIWKKRWDKFIADVATK

SEQ ID NO: 187 - protein, 482 aa, synthetic construct
  REGION 1..482: note = human ADA2 S262R, mature numbering
IDETRAHLLLKEKMMRLGGRLVLNTKEELANERLMTLKIAEMKEAMRTLIFPPSMHFFQAKHLIERSQVFNILRMMPKGAALHLHDIGIVTMDWLVRNVTYRPHCHICFTPRGIMQFRFAHPTPRPSEKCSKWILLEDYRKRVQNVTEFDDSLLRNFTLVTQHPEVIYTNQNVVWSKFETIFFTISGLIHYAPVFRDYVFRSMQEFYEDNVLYMEIRARLLPVYELSGEHHDEEWSVKTYQEVAQKFVETHPEFIGIKIIYRDHRSKDVAVIAESIRMAMGLRIKFPTVVAGFDLVGHEDTGHSLHDYKEALMIPAKDGVKLPYFFHAGETDWQGTSIDRNILDALMLNTTRIGHGFALSKHPAVRTYSWKKDIPIEVCPISNQVLKLVSDLRNHPVATLMATGHPMVISSDDPAMFGAKGLSYDFYEVFMGIGGMKADLRTLKQLAMNSIKYSTLLESEKNTFMEIWKKRWDKFIADVATK

SEQ ID NO: 188 - protein, 482 aa, synthetic construct
  REGION 1..482: note = human ADA2 S262T, mature numbering
IDETRAHLLLKEKMMRLGGRLVLNTKEELANERLMTLKIAEMKEAMRTLIFPPSMHFFQAKHLIERSQVFNILRMMPKGAALHLHDIGIVTMDWLVRNVTYRPHCHICFTPRGIMQFRFAHPTPRPSEKCSKWILLEDYRKRVQNVTEFDDSLLRNFTLVTQHPEVIYTNQNVVWSKFETIFFTISGLIHYAPVFRDYVFRSMQEFYEDNVLYMEIRARLLPVYELSGEHHDEEWSVKTYQEVAQKFVETHPEFIGIKIIYTDHRSKDVAVIAESIRMAMGLRIKFPTVVAGFDLVGHEDTGHSLHDYKEALMIPAKDGVKLPYFFHAGETDWQGTSIDRNILDALMLNTTRIGHGFALSKHPAVRTYSWKKDIPIEVCPISNQVLKLVSDLRNHPVATLMATGHPMVISSDDPAMFGAKGLSYDFYEVFMGIGGMKADLRTLKQLAMNSIKYSTLLESEKNTFMEIWKKRWDKFIADVATK

SEQ ID NO: 189 - protein, 482 aa, synthetic construct
  REGION 1..482: note = human ADA2 S262W, mature numbering
IDETRAHLLLKEKMMRLGGRLVLNTKEELANERLMTLKIAEMKEAMRTLIFPPSMHFFQAKHLIERSQVFNILRMMPKGAALHLHDIGIVTMDWLVRNVTYRPHCHICFTPRGIMQFRFAHPTPRPSEKCSKWILLEDYRKRVQNVTEFDDSLLRNFTLVTQHPEVIYTNQNVVWSKFETIFFTISGLIHYAPVFRDYVFRSMQEFYEDNVLYMEIRARLLPVYELSGEHHDEEWSVKTYQEVAQKFVETHPEFIGIKIIYWDHRSKDVAVIAESIRMAMGLRIKFPTVVAGFDLVGHEDTGHSLHDYKEALMIPAKDGVKLPYFFHAGETDWQGTSIDRNILDALMLNTTRIGHGFALSKHPAVRTYSWKKDIPIEVCPISNQVLKLVSDLRNHPVATLMATGHPMVISSDDPAMFGAKGLSYDFYEVFMGIGGMKADLRTLKQLAMNSIKYSTLLESEKNTFMEIWKKRWDKFIADVATK

SEQ ID NO: 190 - protein, 482 aa, synthetic construct
  REGION 1..482: note = human ADA2 S262Y, mature numbering
IDETRAHLLLKEKMMRLGGRLVLNTKEELANERLMTLKIAEMKEAMRTLIFPPSMHFFQAKHLIERSQVFNILRMMPKGAALHLHDIGIVTMDWLVRNVTYRPHCHICFTPRGIMQFRFAHPTPRPSEKCSKWILLEDYRKRVQNVTEFDDSLLRNFTLVTQHPEVIYTNQNVVWSKFETIFFTISGLIHYAPVFRDYVFRSMQEFYEDNVLYMEIRARLLPVYELSGEHHDEEWSVKTYQEVAQKFVETHPEFIGIKIIYYDHRSKDVAVIAESIRMAMGLRIKFPTVVAGFDLVGHEDTGHSLHDYKEALMIPAKDGVKLPYFFHAGETDWQGTSIDRNILDALMLNTTRIGHGFALSKHPAVRTYSWKKDIPIEVCPISNQVLKLVSDLRNHPVATLMATGHPMVISSDDPAMFGAKGLSYDFYEVFMGIGGMKADLRTLKQLAMNSIKYSTLLESEKNTFMEIWKKRWDKFIADVATK

SEQ ID NO: 191 - protein, 482 aa, synthetic construct
  REGION 1..482: note = human ADA2 H264C, mature numbering
IDETRAHLLLKEKMMRLGGRLVLNTKEELANERLMTLKIAEMKEAMRTLIFPPSMHFFQAKHLIERSQVFNILRMMPKGAALHLHDIGIVTMDWLVRNVTYRPHCHICFTPRGIMQFRFAHPTPRPSEKCSKWILLEDYRKRVQNVTEFDDSLLRNFTLVTQHPEVIYTNQNVVWSKFETIFFTISGLIHYAPVFRDYVFRSMQEFYEDNVLYMEIRARLLPVYELSGEHHDEEWSVKTYQEVAQKFVETHPEFIGIKIIYSDCRSKDVAVIAESIRMAMGLRIKFPTVVAGFDLVGHEDTGHSLHDYKEALMIPAKDGVKLPYFFHAGETDWQGTSIDRNILDALMLNTTRIGHGFALSKHPAVRTYSWKKDIPIEVCPISNQVLKLVSDLRNHPVATLMATGHPMVISSDDPAMFGAKGLSYDFYEVFMGIGGMKADLRTLKQLAMNSIKYSTLLESEKNTFMEIWKKRWDKFIADVATK

SEQ ID NO: 192 - protein, 482 aa, synthetic construct
  REGION 1..482: note = human ADA2 H264D, mature numbering
IDETRAHLLLKEKMMRLGGRLVLNTKEELANERLMTLKIAEMKEAMRTLIFPPSMHFFQAKHLIERSQVFNILRMMPKGAALHLHDIGIVTMDWLVRNVTYRPHCHICFTPRGIMQFRFAHPTPRPSEKCSKWILLEDYRKRVQNVTEFDDSLLRNFTLVTQHPEVIYTNQNVVWSKFETIFFTISGLIHYAPVFRDYVFRSMQEFYEDNVLYMEIRARLLPVYELSGEHHDEEWSVKTYQEVAQKFVETHPEFIGIKIIYSDDRSKDVAVIAESIRMAMGLRIKFPTVVAGFDLVGHEDTGHSLHDYKEALMIPAKDGVKLPYFFHAGETDWQGTSIDRNILDALMLNTTRIGHGFALSKHPAVRTYSWKKDIPIEVCPISNQVLKLVSDLRNHPVATLMATGHPMVISSDDPAMFGAKGLSYDFYEVFMGIGGMKADLRTLKQLAMNSIKYSTLLESEKNTFMEIWKKRWDKFIADVATK

SEQ ID NO: 193 - protein, 482 aa, synthetic construct
  REGION 1..482: note = human ADA2 H264E, mature numbering
IDETRAHLLLKEKMMRLGGRLVLNTKEELANERLMTLKIAEMKEAMRTLIFPPSMHFFQAKHLIERSQVFNILRMMPKGAALHLHDIGIVTMDWLVRNVTYRPHCHICFTPRGIMQFRFAHPTPRPSEKCSKWILLEDYRKRVQNVTEFDDSLLRNFTLVTQHPEVIYTNQNVVWSKFETIFFTISGLIHYAPVFRDYVFRSMQEFYEDNVLYMEIRARLLPVYELSGEHHDEEWSVKTYQEVAQKFVETHPEFIGIKIIYSDERSKDVAVIAESIRMAMGLRIKFPTVVAGFDLVGHEDTGHSLHDYKEALMIPAKDGVKLPYFFHAGETDWQGTSIDRNILDALMLNTTRIGHGFALSKHPAVRTYSWKKDIPIEVCPISNQVLKLVSDLRNHPVATLMATGHPMVISSDDPAMFGAKGLSYDFYEVFMGIGGMKADLRTLKQLAMNSIKYSTLLESEKNTFMEIWKKRWDKFIADVATK

SEQ ID NO: 194 - protein, 482 aa, synthetic construct
  REGION 1..482: note = human ADA2 H264F, mature numbering
IDETRAHLLLKEKMMRLGGRLVLNTKEELANERLMTLKIAEMKEAMRTLIFPPSMHFFQAKHLIERSQVFNILRMMPKGAALHLHDIGIVTMDWLVRNVTYRPHCHICFTPRGIMQFRFAHPTPRPSEKCSKWILLEDYRKRVQNVTEFDDSLLRNFTLVTQHPEVIYTNQNVVWSKFETIFFTISGLIHYAPVFRDYVFRSMQEFYEDNVLYMEIRARLLPVYELSGEHHDEEWSVKTYQEVAQKFVETHPEFIGIKIIYSDFRSKDVAVIAESIRMAMGLRIKFPTVVAGFDLVGHEDTGHSLHDYKEALMIPAKDGVKLPYFFHAGETDWQGTSIDRNILDALMLNTTRIGHGFALSKHPAVRTYSWKKDIPIEVCPISNQVLKLVSDLRNHPVATLMATGHPMVISSDDPAMFGAKGLSYDFYEVFMGIGGMKADLRTLKQLAMNSIKYSTLLESEKNTFMEIWKKRWDKFIADVATK

SEQ ID NO: 195 - protein, 482 aa, synthetic construct
  REGION 1..482: note = human ADA2 H264I, mature numbering
IDETRAHLLLKEKMMRLGGRLVLNTKEELANERLMTLKIAEMKEAMRTLIFPPSMHFFQAKHLIERSQVFNILRMMPKGAALHLHDIGIVTMDWLVRNVTYRPHCHICFTPRGIMQFRFAHPTPRPSEKCSKWILLEDYRKRVQNVTEFDDSLLRNFTLVTQHPEVIYTNQNVVWSKFETIFFTISGLIHYAPVFRDYVFRSMQEFYEDNVLYMEIRARLLPVYELSGEHHDEEWSVKTYQEVAQKFVETHPEFIGIKIIYSDIRSKDVAVIAESIRMAMGLRIKFPTVVAGFDLVGHEDTGHSLHDYKEALMIPAKDGVKLPYFFHAGETDWQGTSIDRNILDALMLNTTRIGHGFALSKHPAVRTYSWKKDIPIEVCPISNQVLKLVSDLRNHPVATLMATGHPMVISSDDPAMFGAKGLSYDFYEVFMGIGGMKADLRTLKQLAMNSIKYSTLLESEKNTFMEIWKKRWDKFIADVATK

SEQ ID NO: 196 - protein, 482 aa, synthetic construct
  REGION 1..482: note = human ADA2 H264K, mature numbering
IDETRAHLLLKEKMMRLGGRLVLNTKEELANERLMTLKIAEMKEAMRTLIFPPSMHFFQAKHLIERSQVFNILRMMPKGAALHLHDIGIVTMDWLVRNVTYRPHCHICFTPRGIMQFRFAHPTPRPSEKCSKWILLEDYRKRVQNVTEFDDSLLRNFTLVTQHPEVIYTNQNVVWSKFETIFFTISGLIHYAPVFRDYVFRSMQEFYEDNVLYMEIRARLLPVYELSGEHHDEEWSVKTYQEVAQKFVETHPEFIGIKIIYSDKRSKDVAVIAESIRMAMGLRIKFPTVVAGFDLVGHEDTGHSLHDYKEALMIPAKDGVKLPYFFHAGETDWQGTSIDRNILDALMLNTTRIGHGFALSKHPAVRTYSWKKDIPIEVCPISNQVLKLVSDLRNHPVATLMATGHPMVISSDDPAMFGAKGLSYDFYEVFMGIGGMKADLRTLKQLAMNSIKYSTLLESEKNTFMEIWKKRWDKFIADVATK

SEQ ID NO: 197 - protein, 482 aa, synthetic construct
  REGION 1..482: note = human ADA2 H264L, mature numbering
IDETRAHLLLKEKMMRLGGRLVLNTKEELANERLMTLKIAEMKEAMRTLIFPPSMHFFQAKHLIERSQVFNILRMMPKGAALHLHDIGIVTMDWLVRNVTYRPHCHICFTPRGIMQFRFAHPTPRPSEKCSKWILLEDYRKRVQNVTEFDDSLLRNFTLVTQHPEVIYTNQNVVWSKFETIFFTISGLIHYAPVFRDYVFRSMQEFYEDNVLYMEIRARLLPVYELSGEHHDEEWSVKTYQEVAQKFVETHPEFIGIKIIYSDLRSKDVAVIAESIRMAMGLRIKFPTVVAGFDLVGHEDTGHSLHDYKEALMIPAKDGVKLPYFFHAGETDWQGTSIDRNILDALMLNTTRIGHGFALSKHPAVRTYSWKKDIPIEVCPISNQVLKLVSDLRNHPVATLMATGHPMVISSDDPAMFGAKGLSYDFYEVFMGIGGMKADLRTLKQLAMNSIKYSTLLESEKNTFMEIWKKRWDKFIADVATK

SEQ ID NO: 198 - protein, 482 aa, synthetic construct
  REGION 1..482: note = human ADA2 H264M, mature numbering
IDETRAHLLLKEKMMRLGGRLVLNTKEELANERLMTLKIAEMKEAMRTLIFPPSMHFFQAKHLIERSQVFNILRMMPKGAALHLHDIGIVTMDWLVRNVTYRPHCHICFTPRGIMQFRFAHPTPRPSEKCSKWILLEDYRKRVQNVTEFDDSLLRNFTLVTQHPEVIYTNQNVVWSKFETIFFTISGLIHYAPVFRDYVFRSMQEFYEDNVLYMEIRARLLPVYELSGEHHDEEWSVKTYQEVAQKFVETHPEFIGIKIIYSDMRSKDVAVIAESIRMAMGLRIKFPTVVAGFDLVGHEDTGHSLHDYKEALMIPAKDGVKLPYFFHAGETDWQGTSIDRNILDALMLNTTRIGHGFALSKHPAVRTYSWKKDIPIEVCPISNQVLKLVSDLRNHPVATLMATGHPMVISSDDPAMFGAKGLSYDFYEVFMGIGGMKADLRTLKQLAMNSIKYSTLLESEKNTFMEIWKKRWDKFIADVATK

SEQ ID NO: 199 - protein, 482 aa, synthetic construct
  REGION 1..482: note = human ADA2 H264P, mature numbering
IDETRAHLLLKEKMMRLGGRLVLNTKEELANERLMTLKIAEMKEAMRTLIFPPSMHFFQAKHLIERSQVFNILRMMPKGAALHLHDIGIVTMDWLVRNVTYRPHCHICFTPRGIMQFRFAHPTPRPSEKCSKWILLEDYRKRVQNVTEFDDSLLRNFTLVTQHPEVIYTNQNVVWSKFETIFFTISGLIHYAPVFRDYVFRSMQEFYEDNVLYMEIRARLLPVYELSGEHHDEEWSVKTYQEVAQKFVETHPEFIGIKIIYSDPRSKDVAVIAESIRMAMGLRIKFPTVVAGFDLVGHEDTGHSLHDYKEALMIPAKDGVKLPYFFHAGETDWQGTSIDRNILDALMLNTTRIGHGFALSKHPAVRTYSWKKDIPIEVCPISNQVLKLVSDLRNHPVATLMATGHPMVISSDDPAMFGAKGLSYDFYEVFMGIGGMKADLRTLKQLAMNSIKYSTLLESEKNTFMEIWKKRWDKFIADVATK

SEQ ID NO: 200 - protein, 482 aa, synthetic construct
  REGION 1..482: note = human ADA2 H264R, mature numbering
IDETRAHLLLKEKMMRLGGRLVLNTKEELANERLMTLKIAEMKEAMRTLIFPPSMHFFQAKHLIERSQVFNILRMMPKGAALHLHDIGIVTMDWLVRNVTYRPHCHICFTPRGIMQFRFAHPTPRPSEKCSKWILLEDYRKRVQNVTEFDDSLLRNFTLVTQHPEVIYTNQNVVWSKFETIFFTISGLIHYAPVFRDYVFRSMQEFYEDNVLYMEIRARLLPVYELSGEHHDEEWSVKTYQEVAQKFVETHPEFIGIKIIYSDRRSKDVAVIAESIRMAMGLRIKFPTVVAGFDLVGHEDTGHSLHDYKEALMIPAKDGVKLPYFFHAGETDWQGTSIDRNILDALMLNTTRIGHGFALSKHPAVRTYSWKKDIPIEVCPISNQVLKLVSDLRNHPVATLMATGHPMVISSDDPAMFGAKGLSYDFYEVFMGIGGMKADLRTLKQLAMNSIKYSTLLESEKNTFMEIWKKRWDKFIADVATK

SEQ ID NO: 201 - protein, 482 aa, synthetic construct
  REGION 1..482: note = human ADA2 H264S, mature numbering
IDETRAHLLLKEKMMRLGGRLVLNTKEELANERLMTLKIAEMKEAMRTLIFPPSMHFFQAKHLIERSQVFNILRMMPKGAALHLHDIGIVTMDWLVRNVTYRPHCHICFTPRGIMQFRFAHPTPRPSEKCSKWILLEDYRKRVQNVTEFDDSLLRNFTLVTQHPEVIYTNQNVVWSKFETIFFTISGLIHYAPVFRDYVFRSMQEFYEDNVLYMEIRARLLPVYELSGEHHDEEWSVKTYQEVAQKFVETHPEFIGIKIIYSDSRSKDVAVIAESIRMAMGLRIKFPTVVAGFDLVGHEDTGHSLHDYKEALMIPAKDGVKLPYFFHAGETDWQGTSIDRNILDALMLNTTRIGHGFALSKHPAVRTYSWKKDIPIEVCPISNQVLKLVSDLRNHPVATLMATGHPMVISSDDPAMFGAKGLSYDFYEVFMGIGGMKADLRTLKQLAMNSIKYSTLLESEKNTFMEIWKKRWDKFIADVATK

SEQ ID NO: 202 - protein, 482 aa, synthetic construct
  REGION 1..482: note = human ADA2 H264T, mature numbering
IDETRAHLLLKEKMMRLGGRLVLNTKEELANERLMTLKIAEMKEAMRTLIFPPSMHFFQAKHLIERSQVFNILRMMPKGAALHLHDIGIVTMDWLVRNVTYRPHCHICFTPRGIMQFRFAHPTPRPSEKCSKWILLEDYRKRVQNVTEFDDSLLRNFTLVTQHPEVIYTNQNVVWSKFETIFFTISGLIHYAPVFRDYVFRSMQEFYEDNVLYMEIRARLLPVYELSGEHHDEEWSVKTYQEVAQKFVETHPEFIGIKIIYSDTRSKDVAVIAESIRMAMGLRIKFPTVVAGFDLVGHEDTGHSLHDYKEALMIPAKDGVKLPYFFHAGETDWQGTSIDRNILDALMLNTTRIGHGFALSKHPAVRTYSWKKDIPIEVCPISNQVLKLVSDLRNHPVATLMATGHPMVISSDDPAMFGAKGLSYDFYEVFMGIGGMKADLRTLKQLAMNSIKYSTLLESEKNTFMEIWKKRWDKFIADVATK

SEQ ID NO: 203 - protein, 482 aa, synthetic construct
  REGION 1..482: note = human ADA2 H264V, mature numbering
IDETRAHLLLKEKMMRLGGRLVLNTKEELANERLMTLKIAEMKEAMRTLIFPPSMHFFQAKHLIERSQVFNILRMMPKGAALHLHDIGIVTMDWLVRNVTYRPHCHICFTPRGIMQFRFAHPTPRPSEKCSKWILLEDYRKRVQNVTEFDDSLLRNFTLVTQHPEVIYTNQNVVWSKFETIFFTISGLIHYAPVFRDYVFRSMQEFYEDNVLYMEIRARLLPVYELSGEHHDEEWSVKTYQEVAQKFVETHPEFIGIKIIYSDVRSKDVAVIAESIRMAMGLRIKFPTVVAGFDLVGHEDTGHSLHDYKEALMIPAKDGVKLPYFFHAGETDWQGTSIDRNILDALMLNTTRIGHGFALSKHPAVRTYSWKKDIPIEVCPISNQVLKLVSDLRNHPVATLMATGHPMVISSDDPAMFGAKGLSYDFYEVFMGIGGMKADLRTLKQLAMNSIKYSTLLESEKNTFMEIWKKRWDKFIADVATK

SEQ ID NO: 204 - protein, 482 aa, synthetic construct
  REGION 1..482: note = human ADA2 H264W, mature numbering
IDETRAHLLLKEKMMRLGGRLVLNTKEELANERLMTLKIAEMKEAMRTLIFPPSMHFFQAKHLIERSQVFNILRMMPKGAALHLHDIGIVTMDWLVRNVTYRPHCHICFTPRGIMQFRFAHPTPRPSEKCSKWILLEDYRKRVQNVTEFDDSLLRNFTLVTQHPEVIYTNQNVVWSKFETIFFTISGLIHYAPVFRDYVFRSMQEFYEDNVLYMEIRARLLPVYELSGEHHDEEWSVKTYQEVAQKFVETHPEFIGIKIIYSDWRSKDVAVIAESIRMAMGLRIKFPTVVAGFDLVGHEDTGHSLHDYKEALMIPAKDGVKLPYFFHAGETDWQGTSIDRNILDALMLNTTRIGHGFALSKHPAVRTYSWKKDIPIEVCPISNQVLKLVSDLRNHPVATLMATGHPMVISSDDPAMFGAKGLSYDFYEVFMGIGGMKADLRTLKQLAMNSIKYSTLLESEKNTFMEIWKKRWDKFIADVATK

SEQ ID NO: 205 - protein, 482 aa, synthetic construct
  REGION 1..482: note = human ADA2 H264Y, mature numbering
IDETRAHLLLKEKMMRLGGRLVLNTKEELANERLMTLKIAEMKEAMRTLIFPPSMHFFQAKHLIERSQVFNILRMMPKGAALHLHDIGIVTMDWLVRNVTYRPHCHICFTPRGIMQFRFAHPTPRPSEKCSKWILLEDYRKRVQNVTEFDDSLLRNFTLVTQHPEVIYTNQNVVWSKFETIFFTISGLIHYAPVFRDYVFRSMQEFYEDNVLYMEIRARLLPVYELSGEHHDEEWSVKTYQEVAQKFVETHPEFIGIKIIYSDYRSKDVAVIAESIRMAMGLRIKFPTVVAGFDLVGHEDTGHSLHDYKEALMIPAKDGVKLPYFFHAGETDWQGTSIDRNILDALMLNTTRIGHGFALSKHPAVRTYSWKKDIPIEVCPISNQVLKLVSDLRNHPVATLMATGHPMVISSDDPAMFGAKGLSYDFYEVFMGIGGMKADLRTLKQLAMNSIKYSTLLESEKNTFMEIWKKRWDKFIADVATK

SEQ ID NO: 206 - protein, 482 aa, synthetic construct
  REGION 1..482: note = human ADA2 S266A, mature numbering
IDETRAHLLLKEKMMRLGGRLVLNTKEELANERLMTLKIAEMKEAMRTLIFPPSMHFFQAKHLIERSQVFNILRMMPKGAALHLHDIGIVTMDWLVRNVTYRPHCHICFTPRGIMQFRFAHPTPRPSEKCSKWILLEDYRKRVQNVTEFDDSLLRNFTLVTQHPEVIYTNQNVVWSKFETIFFTISGLIHYAPVFRDYVFRSMQEFYEDNVLYMEIRARLLPVYELSGEHHDEEWSVKTYQEVAQKFVETHPEFIGIKIIYSDHRAKDVAVIAESIRMAMGLRIKFPTVVAGFDLVGHEDTGHSLHDYKEALMIPAKDGVKLPYFFHAGETDWQGTSIDRNILDALMLNTTRIGHGFALSKHPAVRTYSWKKDIPIEVCPISNQVLKLVSDLRNHPVATLMATGHPMVISSDDPAMFGAKGLSYDFYEVFMGIGGMKADLRTLKQLAMNSIKYSTLLESEKNTFMEIWKKRWDKFIADVATK

SEQ ID NO: 207 - protein, 482 aa, synthetic construct
  REGION 1..482: note = human ADA2 S266C, mature numbering
IDETRAHLLLKEKMMRLGGRLVLNTKEELANERLMTLKIAEMKEAMRTLIFPPSMHFFQAKHLIERSQVFNILRMMPKGAALHLHDIGIVTMDWLVRNVTYRPHCHICFTPRGIMQFRFAHPTPRPSEKCSKWILLEDYRKRVQNVTEFDDSLLRNFTLVTQHPEVIYTNQNVVWSKFETIFFTISGLIHYAPVFRDYVFRSMQEFYEDNVLYMEIRARLLPVYELSGEHHDEEWSVKTYQEVAQKFVETHPEFIGIKIIYSDHRCKDVAVIAESIRMAMGLRIKFPTVVAGFDLVGHEDTGHSLHDYKEALMIPAKDGVKLPYFFHAGETDWQGTSIDRNILDALMLNTTRIGHGFALSKHPAVRTYSWKKDIPIEVCPISNQVLKLVSDLRNHPVATLMATGHPMVISSDDPAMFGAKGLSYDFYEVFMGIGGMKADLRTLKQLAMNSIKYSTLLESEKNTFMEIWKKRWDKFIADVATK

SEQ ID NO: 208 - protein, 482 aa, synthetic construct
  REGION 1..482: note = human ADA2 S266D, mature numbering
IDETRAHLLLKEKMMRLGGRLVLNTKEELANERLMTLKIAEMKEAMRTLIFPPSMHFFQAKHLIERSQVFNILRMMPKGAALHLHDIGIVTMDWLVRNVTYRPHCHICFTPRGIMQFRFAHPTPRPSEKCSKWILLEDYRKRVQNVTEFDDSLLRNFTLVTQHPEVIYTNQNVVWSKFETIFFTISGLIHYAPVFRDYVFRSMQEFYEDNVLYMEIRARLLPVYELSGEHHDEEWSVKTYQEVAQKFVETHPEFIGIKIIYSDHRDKDVAVIAESIRMAMGLRIKFPTVVAGFDLVGHEDTGHSLHDYKEALMIPAKDGVKLPYFFHAGETDWQGTSIDRNILDALMLNTTRIGHGFALSKHPAVRTYSWKKDIPIEVCPISNQVLKLVSDLRNHPVATLMATGHPMVISSDDPAMFGAKGLSYDFYEVFMGIGGMKADLRTLKQLAMNSIKYSTLLESEKNTFMEIWKKRWDKFIADVATK

SEQ ID NO: 209 - protein, 482 aa, synthetic construct
  REGION 1..482: note = human ADA2 S266E, mature numbering
IDETRAHLLLKEKMMRLGGRLVLNTKEELANERLMTLKIAEMKEAMRTLIFPPSMHFFQAKHLIERSQVFNILRMMPKGAALHLHDIGIVTMDWLVRNVTYRPHCHICFTPRGIMQFRFAHPTPRPSEKCSKWILLEDYRKRVQNVTEFDDSLLRNFTLVTQHPEVIYTNQNVVWSKFETIFFTISGLIHYAPVFRDYVFRSMQEFYEDNVLYMEIRARLLPVYELSGEHHDEEWSVKTYQEVAQKFVETHPEFIGIKIIYSDHREKDVAVIAESIRMAMGLRIKFPTVVAGFDLVGHEDTGHSLHDYKEALMIPAKDGVKLPYFFHAGETDWQGTSIDRNILDALMLNTTRIGHGFALSKHPAVRTYSWKKDIPIEVCPISNQVLKLVSDLRNHPVATLMATGHPMVISSDDPAMFGAKGLSYDFYEVFMGIGGMKADLRTLKQLAMNSIKYSTLLESEKNTFMEIWKKRWDKFIADVATK

SEQ ID NO: 210 - protein, 482 aa, synthetic construct
  REGION 1..482: note = human ADA2 S266F, mature numbering
IDETRAHLLLKEKMMRLGGRLVLNTKEELANERLMTLKIAEMKEAMRTLIFPPSMHFFQAKHLIERSQVFNILRMMPKGAALHLHDIGIVTMDWLVRNVTYRPHCHICFTPRGIMQFRFAHPTPRPSEKCSKWILLEDYRKRVQNVTEFDDSLLRNFTLVTQHPEVIYTNQNVVWSKFETIFFTISGLIHYAPVFRDYVFRSMQEFYEDNVLYMEIRARLLPVYELSGEHHDEEWSVKTYQEVAQKFVETHPEFIGIKIIYSDHRFKDVAVIAESIRMAMGLRIKFPTVVAGFDLVGHEDTGHSLHDYKEALMIPAKDGVKLPYFFHAGETDWQGTSIDRNILDALMLNTTRIGHGFALSKHPAVRTYSWKKDIPIEVCPISNQVLKLVSDLRNHPVATLMATGHPMVISSDDPAMFGAKGLSYDFYEVFMGIGGMKADLRTLKQLAMNSIKYSTLLESEKNTFMEIWKKRWDKFIADVATK

SEQ ID NO: 211 - protein, 482 aa, synthetic construct
  REGION 1..482: note = human ADA2 S266G, mature numbering
IDETRAHLLLKEKMMRLGGRLVLNTKEELANERLMTLKIAEMKEAMRTLIFPPSMHFFQAKHLIERSQVFNILRMMPKGAALHLHDIGIVTMDWLVRNVTYRPHCHICFTPRGIMQFRFAHPTPRPSEKCSKWILLEDYRKRVQNVTEFDDSLLRNFTLVTQHPEVIYTNQNVVWSKFETIFFTISGLIHYAPVFRDYVFRSMQEFYEDNVLYMEIRARLLPVYELSGEHHDEEWSVKTYQEVAQKFVETHPEFIGIKIIYSDHRGKDVAVIAESIRMAMGLRIKFPTVVAGFDLVGHEDTGHSLHDYKEALMIPAKDGVKLPYFFHAGETDWQGTSIDRNILDALMLNTTRIGHGFALSKHPAVRTYSWKKDIPIEVCPISNQVLKLVSDLRNHPVATLMATGHPMVISSDDPAMFGAKGLSYDFYEVFMGIGGMKADLRTLKQLAMNSIKYSTLLESEKNTFMEIWKKRWDKFIADVATK

SEQ ID NO: 212 - protein, 482 aa, synthetic construct
  REGION 1..482: note = human ADA2 S266H, mature numbering
IDETRAHLLLKEKMMRLGGRLVLNTKEELANERLMTLKIAEMKEAMRTLIFPPSMHFFQAKHLIERSQVFNILRMMPKGAALHLHDIGIVTMDWLVRNVTYRPHCHICFTPRGIMQFRFAHPTPRPSEKCSKWILLEDYRKRVQNVTEFDDSLLRNFTLVTQHPEVIYTNQNVVWSKFETIFFTISGLIHYAPVFRDYVFRSMQEFYEDNVLYMEIRARLLPVYELSGEHHDEEWSVKTYQEVAQKFVETHPEFIGIKIIYSDHRHKDVAVIAESIRMAMGLRIKFPTVVAGFDLVGHEDTGHSLHDYKEALMIPAKDGVKLPYFFHAGETDWQGTSIDRNILDALMLNTTRIGHGFALSKHPAVRTYSWKKDIPIEVCPISNQVLKLVSDLRNHPVATLMATGHPMVISSDDPAMFGAKGLSYDFYEVFMGIGGMKADLRTLKQLAMNSIKYSTLLESEKNTFMEIWKKRWDKFIADVATK

SEQ ID NO: 213 - protein, 482 aa, synthetic construct
  REGION 1..482: note = human ADA2 S266I, mature numbering
IDETRAHLLLKEKMMRLGGRLVLNTKEELANERLMTLKIAEMKEAMRTLIFPPSMHFFQAKHLIERSQVFNILRMMPKGAALHLHDIGIVTMDWLVRNVTYRPHCHICFTPRGIMQFRFAHPTPRPSEKCSKWILLEDYRKRVQNVTEFDDSLLRNFTLVTQHPEVIYTNQNVVWSKFETIFFTISGLIHYAPVFRDYVFRSMQEFYEDNVLYMEIRARLLPVYELSGEHHDEEWSVKTYQEVAQKFVETHPEFIGIKIIYSDHRIKDVAVIAESIRMAMGLRIKFPTVVAGFDLVGHEDTGHSLHDYKEALMIPAKDGVKLPYFFHAGETDWQGTSIDRNILDALMLNTTRIGHGFALSKHPAVRTYSWKKDIPIEVCPISNQVLKLVSDLRNHPVATLMATGHPMVISSDDPAMFGAKGLSYDFYEVFMGIGGMKADLRTLKQLAMNSIKYSTLLESEKNTFMEIWKKRWDKFIADVATK

SEQ ID NO: 214 - protein, 482 aa, synthetic construct
  REGION 1..482: note = human ADA2 S266K, mature numbering
IDETRAHLLLKEKMMRLGGRLVLNTKEELANERLMTLKIAEMKEAMRTLIFPPSMHFFQAKHLIERSQVFNILRMMPKGAALHLHDIGIVTMDWLVRNVTYRPHCHICFTPRGIMQFRFAHPTPRPSEKCSKWILLEDYRKRVQNVTEFDDSLLRNFTLVTQHPEVIYTNQNVVWSKFETIFFTISGLIHYAPVFRDYVFRSMQEFYEDNVLYMEIRARLLPVYELSGEHHDEEWSVKTYQEVAQKFVETHPEFIGIKIIYSDHRKKDVAVIAESIRMAMGLRIKFPTVVAGFDLVGHEDTGHSLHDYKEALMIPAKDGVKLPYFFHAGETDWQGTSIDRNILDALMLNTTRIGHGFALSKHPAVRTYSWKKDIPIEVCPISNQVLKLVSDLRNHPVATLMATGHPMVISSDDPAMFGAKGLSYDFYEVFMGIGGMKADLRTLKQLAMNSIKYSTLLESEKNTFMEIWKKRWDKFIADVATK

SEQ ID NO: 215 - protein, 482 aa, synthetic construct
  REGION 1..482: note = human ADA2 S266L, mature numbering
IDETRAHLLLKEKMMRLGGRLVLNTKEELANERLMTLKIAEMKEAMRTLIFPPSMHFFQAKHLIERSQVFNILRMMPKGAALHLHDIGIVTMDWLVRNVTYRPHCHICFTPRGIMQFRFAHPTPRPSEKCSKWILLEDYRKRVQNVTEFDDSLLRNFTLVTQHPEVIYTNQNVVWSKFETIFFTISGLIHYAPVFRDYVFRSMQEFYEDNVLYMEIRARLLPVYELSGEHHDEEWSVKTYQEVAQKFVETHPEFIGIKIIYSDHRLKDVAVIAESIRMAMGLRIKFPTVVAGFDLVGHEDTGHSLHDYKEALMIPAKDGVKLPYFFHAGETDWQGTSIDRNILDALMLNTTRIGHGFALSKHPAVRTYSWKKDIPIEVCPISNQVLKLVSDLRNHPVATLMATGHPMVISSDDPAMFGAKGLSYDFYEVFMGIGGMKADLRTLKQLAMNSIKYSTLLESEKNTFMEIWKKRWDKFIADVATK

SEQ ID NO: 216 - protein, 482 aa, synthetic construct
  REGION 1..482: note = human ADA2 S266M, mature numbering
IDETRAHLLLKEKMMRLGGRLVLNTKEELANERLMTLKIAEMKEAMRTLIFPPSMHFFQAKHLIERSQVFNILRMMPKGAALHLHDIGIVTMDWLVRNVTYRPHCHICFTPRGIMQFRFAHPTPRPSEKCSKWILLEDYRKRVQNVTEFDDSLLRNFTLVTQHPEVIYTNQNVVWSKFETIFFTISGLIHYAPVFRDYVFRSMQEFYEDNVLYMEIRARLLPVYELSGEHHDEEWSVKTYQEVAQKFVETHPEFIGIKIIYSDHRMKDVAVIAESIRMAMGLRIKFPTVVAGFDLVGHEDTGHSLHDYKEALMIPAKDGVKLPYFFHAGETDWQGTSIDRNILDALMLNTTRIGHGFALSKHPAVRTYSWKKDIPIEVCPISNQVLKLVSDLRNHPVATLMATGHPMVISSDDPAMFGAKGLSYDFYEVFMGIGGMKADLRTLKQLAMNSIKYSTLLESEKNTFMEIWKKRWDKFIADVATK

SEQ ID NO: 217 - protein, 482 aa, synthetic construct
  REGION 1..482: note = human ADA2 S266N, mature numbering
IDETRAHLLLKEKMMRLGGRLVLNTKEELANERLMTLKIAEMKEAMRTLIFPPSMHFFQAKHLIERSQVFNILRMMPKGAALHLHDIGIVTMDWLVRNVTYRPHCHICFTPRGIMQFRFAHPTPRPSEKCSKWILLEDYRKRVQNVTEFDDSLLRNFTLVTQHPEVIYTNQNVVWSKFETIFFTISGLIHYAPVFRDYVFRSMQEFYEDNVLYMEIRARLLPVYELSGEHHDEEWSVKTYQEVAQKFVETHPEFIGIKIIYSDHRNKDVAVIAESIRMAMGLRIKFPTVVAGFDLVGHEDTGHSLHDYKEALMIPAKDGVKLPYFFHAGETDWQGTSIDRNILDALMLNTTRIGHGFALSKHPAVRTYSWKKDIPIEVCPISNQVLKLVSDLRNHPVATLMATGHPMVISSDDPAMFGAKGLSYDFYEVFMGIGGMKADLRTLKQLAMNSIKYSTLLESEKNTFMEIWKKRWDKFIADVATK

SEQ ID NO: 218 - protein, 482 aa, synthetic construct
  REGION 1..482: note = human ADA2 S266P, mature numbering
IDETRAHLLLKEKMMRLGGRLVLNTKEELANERLMTLKIAEMKEAMRTLIFPPSMHFFQAKHLIERSQVFNILRMMPKGAALHLHDIGIVTMDWLVRNVTYRPHCHICFTPRGIMQFRFAHPTPRPSEKCSKWILLEDYRKRVQNVTEFDDSLLRNFTLVTQHPEVIYTNQNVVWSKFETIFFTISGLIHYAPVFRDYVFRSMQEFYEDNVLYMEIRARLLPVYELSGEHHDEEWSVKTYQEVAQKFVETHPEFIGIKIIYSDHRPKDVAVIAESIRMAMGLRIKFPTVVAGFDLVGHEDTGHSLHDYKEALMIPAKDGVKLPYFFHAGETDWQGTSIDRNILDALMLNTTRIGHGFALSKHPAVRTYSWKKDIPIEVCPISNQVLKLVSDLRNHPVATLMATGHPMVISSDDPAMFGAKGLSYDFYEVFMGIGGMKADLRTLKQLAMNSIKYSTLLESEKNTFMEIWKKRWDKFIADVATK

SEQ ID NO: 219 - protein, 482 aa, synthetic construct
  REGION 1..482: note = human ADA2 S266Q, mature numbering
IDETRAHLLLKEKMMRLGGRLVLNTKEELANERLMTLKIAEMKEAMRTLIFPPSMHFFQAKHLIERSQVFNILRMMPKGAALHLHDIGIVTMDWLVRNVTYRPHCHICFTPRGIMQFRFAHPTPRPSEKCSKWILLEDYRKRVQNVTEFDDSLLRNFTLVTQHPEVIYTNQNVVWSKFETIFFTISGLIHYAPVFRDYVFRSMQEFYEDNVLYMEIRARLLPVYELSGEHHDEEWSVKTYQEVAQKFVETHPEFIGIKIIYSDHRQKDVAVIAESIRMAMGLRIKFPTVVAGFDLVGHEDTGHSLHDYKEALMIPAKDGVKLPYFFHAGETDWQGTSIDRNILDALMLNTTRIGHGFALSKHPAVRTYSWKKDIPIEVCPISNQVLKLVSDLRNHPVATLMATGHPMVISSDDPAMFGAKGLSYDFYEVFMGIGGMKADLRTLKQLAMNSIKYSTLLESEKNTFMEIWKKRWDKFIADVATK

SEQ ID NO: 220 - protein, 482 aa, synthetic construct
  REGION 1..482: note = human ADA2 S266R, mature numbering
IDETRAHLLLKEKMMRLGGRLVLNTKEELANERLMTLKIAEMKEAMRTLIFPPSMHFFQAKHLIERSQVFNILRMMPKGAALHLHDIGIVTMDWLVRNVTYRPHCHICFTPRGIMQFRFAHPTPRPSEKCSKWILLEDYRKRVQNVTEFDDSLLRNFTLVTQHPEVIYTNQNVVWSKFETIFFTISGLIHYAPVFRDYVFRSMQEFYEDNVLYMEIRARLLPVYELSGEHHDEEWSVKTYQEVAQKFVETHPEFIGIKIIYSDHRRKDVAVIAESIRMAMGLRIKFPTVVAGFDLVGHEDTGHSLHDYKEALMIPAKDGVKLPYFFHAGETDWQGTSIDRNILDALMLNTTRIGHGFALSKHPAVRTYSWKKDIPIEVCPISNQVLKLVSDLRNHPVATLMATGHPMVISSDDPAMFGAKGLSYDFYEVFMGIGGMKADLRTLKQLAMNSIKYSTLLESEKNTFMEIWKKRWDKFIADVATK

SEQ ID NO: 221 - protein, 482 aa, synthetic construct
  REGION 1..482: note = human ADA2 S266T, mature numbering
IDETRAHLLLKEKMMRLGGRLVLNTKEELANERLMTLKIAEMKEAMRTLIFPPSMHFFQAKHLIERSQVFNILRMMPKGAALHLHDIGIVTMDWLVRNVTYRPHCHICFTPRGIMQFRFAHPTPRPSEKCSKWILLEDYRKRVQNVTEFDDSLLRNFTLVTQHPEVIYTNQNVVWSKFETIFFTISGLIHYAPVFRDYVFRSMQEFYEDNVLYMEIRARLLPVYELSGEHHDEEWSVKTYQEVAQKFVETHPEFIGIKIIYSDHRTKDVAVIAESIRMAMGLRIKFPTVVAGFDLVGHEDTGHSLHDYKEALMIPAKDGVKLPYFFHAGETDWQGTSIDRNILDALMLNTTRIGHGFALSKHPAVRTYSWKKDIPIEVCPISNQVLKLVSDLRNHPVATLMATGHPMVISSDDPAMFGAKGLSYDFYEVFMGIGGMKADLRTLKQLAMNSIKYSTLLESEKNTFMEIWKKRWDKFIADVATK

SEQ ID NO: 222 - protein, 482 aa, synthetic construct
  REGION 1..482: note = human ADA2 S266V, mature numbering
IDETRAHLLLKEKMMRLGGRLVLNTKEELANERLMTLKIAEMKEAMRTLIFPPSMHFFQAKHLIERSQVFNILRMMPKGAALHLHDIGIVTMDWLVRNVTYRPHCHICFTPRGIMQFRFAHPTPRPSEKCSKWILLEDYRKRVQNVTEFDDSLLRNFTLVTQHPEVIYTNQNVVWSKFETIFFTISGLIHYAPVFRDYVFRSMQEFYEDNVLYMEIRARLLPVYELSGEHHDEEWSVKTYQEVAQKFVETHPEFIGIKIIYSDHRVKDVAVIAESIRMAMGLRIKFPTVVAGFDLVGHEDTGHSLHDYKEALMIPAKDGVKLPYFFHAGETDWQGTSIDRNILDALMLNTTRIGHGFALSKHPAVRTYSWKKDIPIEVCPISNQVLKLVSDLRNHPVATLMATGHPMVISSDDPAMFGAKGLSYDFYEVFMGIGGMKADLRTLKQLAMNSIKYSTLLESEKNTFMEIWKKRWDKFIADVATK

SEQ ID NO: 223 - protein, 482 aa, synthetic construct
  REGION 1..482: note = human ADA2 S266W, mature numbering
IDETRAHLLLKEKMMRLGGRLVLNTKEELANERLMTLKIAEMKEAMRTLIFPPSMHFFQAKHLIERSQVFNILRMMPKGAALHLHDIGIVTMDWLVRNVTYRPHCHICFTPRGIMQFRFAHPTPRPSEKCSKWILLEDYRKRVQNVTEFDDSLLRNFTLVTQHPEVIYTNQNVVWSKFETIFFTISGLIHYAPVFRDYVFRSMQEFYEDNVLYMEIRARLLPVYELSGEHHDEEWSVKTYQEVAQKFVETHPEFIGIKIIYSDHRWKDVAVIAESIRMAMGLRIKFPTVVAGFDLVGHEDTGHSLHDYKEALMIPAKDGVKLPYFFHAGETDWQGTSIDRNILDALMLNTTRIGHGFALSKHPAVRTYSWKKDIPIEVCPISNQVLKLVSDLRNHPVATLMATGHPMVISSDDPAMFGAKGLSYDFYEVFMGIGGMKADLRTLKQLAMNSIKYSTLLESEKNTFMEIWKKRWDKFIADVATK

SEQ ID NO: 224 - protein, 482 aa, synthetic construct
  REGION 1..482: note = human ADA2 S266Y, mature numbering
IDETRAHLLLKEKMMRLGGRLVLNTKEELANERLMTLKIAEMKEAMRTLIFPPSMHFFQAKHLIERSQVFNILRMMPKGAALHLHDIGIVTMDWLVRNVTYRPHCHICFTPRGIMQFRFAHPTPRPSEKCSKWILLEDYRKRVQNVTEFDDSLLRNFTLVTQHPEVIYTNQNVVWSKFETIFFTISGLIHYAPVFRDYVFRSMQEFYEDNVLYMEIRARLLPVYELSGEHHDEEWSVKTYQEVAQKFVETHPEFIGIKIIYSDHRYKDVAVIAESIRMAMGLRIKFPTVVAGFDLVGHEDTGHSLHDYKEALMIPAKDGVKLPYFFHAGETDWQGTSIDRNILDALMLNTTRIGHGFALSKHPAVRTYSWKKDIPIEVCPISNQVLKLVSDLRNHPVATLMATGHPMVISSDDPAMFGAKGLSYDFYEVFMGIGGMKADLRTLKQLAMNSIKYSTLLESEKNTFMEIWKKRWDKFIADVATK

SEQ ID NO: 225 - protein, 482 aa, synthetic construct
  REGION 1..482: note = human ADA2 K267A, mature numbering
IDETRAHLLLKEKMMRLGGRLVLNTKEELANERLMTLKIAEMKEAMRTLIFPPSMHFFQAKHLIERSQVFNILRMMPKGAALHLHDIGIVTMDWLVRNVTYRPHCHICFTPRGIMQFRFAHPTPRPSEKCSKWILLEDYRKRVQNVTEFDDSLLRNFTLVTQHPEVIYTNQNVVWSKFETIFFTISGLIHYAPVFRDYVFRSMQEFYEDNVLYMEIRARLLPVYELSGEHHDEEWSVKTYQEVAQKFVETHPEFIGIKIIYSDHRSADVAVIAESIRMAMGLRIKFPTVVAGFDLVGHEDTGHSLHDYKEALMIPAKDGVKLPYFFHAGETDWQGTSIDRNILDALMLNTTRIGHGFALSKHPAVRTYSWKKDIPIEVCPISNQVLKLVSDLRNHPVATLMATGHPMVISSDDPAMFGAKGLSYDFYEVFMGIGGMKADLRTLKQLAMNSIKYSTLLESEKNTFMEIWKKRWDKFIADVATK

SEQ ID NO: 226 - protein, 482 aa, synthetic construct
  REGION 1..482: note = human ADA2 K267C, mature numbering
IDETRAHLLLKEKMMRLGGRLVLNTKEELANERLMTLKIAEMKEAMRTLIFPPSMHFFQAKHLIERSQVFNILRMMPKGAALHLHDIGIVTMDWLVRNVTYRPHCHICFTPRGIMQFRFAHPTPRPSEKCSKWILLEDYRKRVQNVTEFDDSLLRNFTLVTQHPEVIYTNQNVVWSKFETIFFTISGLIHYAPVFRDYVFRSMQEFYEDNVLYMEIRARLLPVYELSGEHHDEEWSVKTYQEVAQKFVETHPEFIGIKIIYSDHRSCDVAVIAESIRMAMGLRIKFPTVVAGFDLVGHEDTGHSLHDYKEALMIPAKDGVKLPYFFHAGETDWQGTSIDRNILDALMLNTTRIGHGFALSKHPAVRTYSWKKDIPIEVCPISNQVLKLVSDLRNHPVATLMATGHPMVISSDDPAMFGAKGLSYDFYEVFMGIGGMKADLRTLKQLAMNSIKYSTLLESEKNTFMEIWKKRWDKFIADVATK

SEQ ID NO: 227 - protein, 482 aa, synthetic construct
  REGION 1..482: note = human ADA2 K267D, mature numbering
IDETRAHLLLKEKMMRLGGRLVLNTKEELANERLMTLKIAEMKEAMRTLIFPPSMHFFQAKHLIERSQVFNILRMMPKGAALHLHDIGIVTMDWLVRNVTYRPHCHICFTPRGIMQFRFAHPTPRPSEKCSKWILLEDYRKRVQNVTEFDDSLLRNFTLVTQHPEVIYTNQNVVWSKFETIFFTISGLIHYAPVFRDYVFRSMQEFYEDNVLYMEIRARLLPVYELSGEHHDEEWSVKTYQEVAQKFVETHPEFIGIKIIYSDHRSDDVAVIAESIRMAMGLRIKFPTVVAGFDLVGHEDTGHSLHDYKEALMIPAKDGVKLPYFFHAGETDWQGTSIDRNILDALMLNTTRIGHGFALSKHPAVRTYSWKKDIPIEVCPISNQVLKLVSDLRNHPVATLMATGHPMVISSDDPAMFGAKGLSYDFYEVFMGIGGMKADLRTLKQLAMNSIKYSTLLESEKNTFMEIWKKRWDKFIADVATK

SEQ ID NO: 228 - protein, 482 aa, synthetic construct
  REGION 1..482: note = human ADA2 K267E, mature numbering
IDETRAHLLLKEKMMRLGGRLVLNTKEELANERLMTLKIAEMKEAMRTLIFPPSMHFFQAKHLIERSQVFNILRMMPKGAALHLHDIGIVTMDWLVRNVTYRPHCHICFTPRGIMQFRFAHPTPRPSEKCSKWILLEDYRKRVQNVTEFDDSLLRNFTLVTQHPEVIYTNQNVVWSKFETIFFTISGLIHYAPVFRDYVFRSMQEFYEDNVLYMEIRARLLPVYELSGEHHDEEWSVKTYQEVAQKFVETHPEFIGIKIIYSDHRSEDVAVIAESIRMAMGLRIKFPTVVAGFDLVGHEDTGHSLHDYKEALMIPAKDGVKLPYFFHAGETDWQGTSIDRNILDALMLNTTRIGHGFALSKHPAVRTYSWKKDIPIEVCPISNQVLKLVSDLRNHPVATLMATGHPMVISSDDPAMFGAKGLSYDFYEVFMGIGGMKADLRTLKQLAMNSIKYSTLLESEKNTFMEIWKKRWDKFIADVATK

SEQ ID NO: 229 - protein, 482 aa, synthetic construct
  REGION 1..482: note = human ADA2 K267F, mature numbering
IDETRAHLLLKEKMMRLGGRLVLNTKEELANERLMTLKIAEMKEAMRTLIFPPSMHFFQAKHLIERSQVFNILRMMPKGAALHLHDIGIVTMDWLVRNVTYRPHCHICFTPRGIMQFRFAHPTPRPSEKCSKWILLEDYRKRVQNVTEFDDSLLRNFTLVTQHPEVIYTNQNVVWSKFETIFFTISGLIHYAPVFRDYVFRSMQEFYEDNVLYMEIRARLLPVYELSGEHHDEEWSVKTYQEVAQKFVETHPEFIGIKIIYSDHRSFDVAVIAESIRMAMGLRIKFPTVVAGFDLVGHEDTGHSLHDYKEALMIPAKDGVKLPYFFHAGETDWQGTSIDRNILDALMLNTTRIGHGFALSKHPAVRTYSWKKDIPIEVCPISNQVLKLVSDLRNHPVATLMATGHPMVISSDDPAMFGAKGLSYDFYEVFMGIGGMKADLRTLKQLAMNSIKYSTLLESEKNTFMEIWKKRWDKFIADVATK

SEQ ID NO: 230 - protein, 482 aa, synthetic construct
  REGION 1..482: note = human ADA2 K267G, mature numbering
IDETRAHLLLKEKMMRLGGRLVLNTKEELANERLMTLKIAEMKEAMRTLIFPPSMHFFQAKHLIERSQVFNILRMMPKGAALHLHDIGIVTMDWLVRNVTYRPHCHICFTPRGIMQFRFAHPTPRPSEKCSKWILLEDYRKRVQNVTEFDDSLLRNFTLVTQHPEVIYTNQNVVWSKFETIFFTISGLIHYAPVFRDYVFRSMQEFYEDNVLYMEIRARLLPVYELSGEHHDEEWSVKTYQEVAQKFVETHPEFIGIKIIYSDHRSGDVAVIAESIRMAMGLRIKFPTVVAGFDLVGHEDTGHSLHDYKEALMIPAKDGVKLPYFFHAGETDWQGTSIDRNILDALMLNTTRIGHGFALSKHPAVRTYSWKKDIPIEVCPISNQVLKLVSDLRNHPVATLMATGHPMVISSDDPAMFGAKGLSYDFYEVFMGIGGMKADLRTLKQLAMNSIKYSTLLESEKNTFMEIWKKRWDKFIADVATK

SEQ ID NO: 231 - protein, 482 aa, synthetic construct
  REGION 1..482: note = human ADA2 K267H, mature numbering
IDETRAHLLLKEKMMRLGGRLVLNTKEELANERLMTLKIAEMKEAMRTLIFPPSMHFFQAKHLIERSQVFNILRMMPKGAALHLHDIGIVTMDWLVRNVTYRPHCHICFTPRGIMQFRFAHPTPRPSEKCSKWILLEDYRKRVQNVTEFDDSLLRNFTLVTQHPEVIYTNQNVVWSKFETIFFTISGLIHYAPVFRDYVFRSMQEFYEDNVLYMEIRARLLPVYELSGEHHDEEWSVKTYQEVAQKFVETHPEFIGIKIIYSDHRSHDVAVIAESIRMAMGLRIKFPTVVAGFDLVGHEDTGHSLHDYKEALMIPAKDGVKLPYFFHAGETDWQGTSIDRNILDALMLNTTRIGHGFALSKHPAVRTYSWKKDIPIEVCPISNQVLKLVSDLRNHPVATLMATGHPMVISSDDPAMFGAKGLSYDFYEVFMGIGGMKADLRTLKQLAMNSIKYSTLLESEKNTFMEIWKKRWDKFIADVATK

SEQ ID NO: 232 - protein, 482 aa, synthetic construct
  REGION 1..482: note = human ADA2 K267I, mature numbering
IDETRAHLLLKEKMMRLGGRLVLNTKEELANERLMTLKIAEMKEAMRTLIFPPSMHFFQAKHLIERSQVFNILRMMPKGAALHLHDIGIVTMDWLVRNVTYRPHCHICFTPRGIMQFRFAHPTPRPSEKCSKWILLEDYRKRVQNVTEFDDSLLRNFTLVTQHPEVIYTNQNVVWSKFETIFFTISGLIHYAPVFRDYVFRSMQEFYEDNVLYMEIRARLLPVYELSGEHHDEEWSVKTYQEVAQKFVETHPEFIGIKIIYSDHRSIDVAVIAESIRMAMGLRIKFPTVVAGFDLVGHEDTGHSLHDYKEALMIPAKDGVKLPYFFHAGETDWQGTSIDRNILDALMLNTTRIGHGFALSKHPAVRTYSWKKDIPIEVCPISNQVLKLVSDLRNHPVATLMATGHPMVISSDDPAMFGAKGLSYDFYEVFMGIGGMKADLRTLKQLAMNSIKYSTLLESEKNTFMEIWKKRWDKFIADVATK

SEQ ID NO: 233 - protein, 482 aa, synthetic construct
  REGION 1..482: note = human ADA2 K267L, mature numbering
IDETRAHLLLKEKMMRLGGRLVLNTKEELANERLMTLKIAEMKEAMRTLIFPPSMHFFQAKHLIERSQVFNILRMMPKGAALHLHDIGIVTMDWLVRNVTYRPHCHICFTPRGIMQFRFAHPTPRPSEKCSKWILLEDYRKRVQNVTEFDDSLLRNFTLVTQHPEVIYTNQNVVWSKFETIFFTISGLIHYAPVFRDYVFRSMQEFYEDNVLYMEIRARLLPVYELSGEHHDEEWSVKTYQEVAQKFVETHPEFIGIKIIYSDHRSLDVAVIAESIRMAMGLRIKFPTVVAGFDLVGHEDTGHSLHDYKEALMIPAKDGVKLPYFFHAGETDWQGTSIDRNILDALMLNTTRIGHGFALSKHPAVRTYSWKKDIPIEVCPISNQVLKLVSDLRNHPVATLMATGHPMVISSDDPAMFGAKGLSYDFYEVFMGIGGMKADLRTLKQLAMNSIKYSTLLESEKNTFMEIWKKRWDKFIADVATK

SEQ ID NO: 234 - protein, 482 aa, synthetic construct
  REGION 1..482: note = human ADA2 K267M, mature numbering
IDETRAHLLLKEKMMRLGGRLVLNTKEELANERLMTLKIAEMKEAMRTLIFPPSMHFFQAKHLIERSQVFNILRMMPKGAALHLHDIGIVTMDWLVRNVTYRPHCHICFTPRGIMQFRFAHPTPRPSEKCSKWILLEDYRKRVQNVTEFDDSLLRNFTLVTQHPEVIYTNQNVVWSKFETIFFTISGLIHYAPVFRDYVFRSMQEFYEDNVLYMEIRARLLPVYELSGEHHDEEWSVKTYQEVAQKFVETHPEFIGIKIIYSDHRSMDVAVIAESIRMAMGLRIKFPTVVAGFDLVGHEDTGHSLHDYKEALMIPAKDGVKLPYFFHAGETDWQGTSIDRNILDALMLNTTRIGHGFALSKHPAVRTYSWKKDIPIEVCPISNQVLKLVSDLRNHPVATLMATGHPMVISSDDPAMFGAKGLSYDFYEVFMGIGGMKADLRTLKQLAMNSIKYSTLLESEKNTFMEIWKKRWDKFIADVATK

SEQ ID NO: 235 - protein, 482 aa, synthetic construct
  REGION 1..482: note = human ADA2 K267N, mature numbering
IDETRAHLLLKEKMMRLGGRLVLNTKEELANERLMTLKIAEMKEAMRTLIFPPSMHFFQAKHLIERSQVFNILRMMPKGAALHLHDIGIVTMDWLVRNVTYRPHCHICFTPRGIMQFRFAHPTPRPSEKCSKWILLEDYRKRVQNVTEFDDSLLRNFTLVTQHPEVIYTNQNVVWSKFETIFFTISGLIHYAPVFRDYVFRSMQEFYEDNVLYMEIRARLLPVYELSGEHHDEEWSVKTYQEVAQKFVETHPEFIGIKIIYSDHRSNDVAVIAESIRMAMGLRIKFPTVVAGFDLVGHEDTGHSLHDYKEALMIPAKDGVKLPYFFHAGETDWQGTSIDRNILDALMLNTTRIGHGFALSKHPAVRTYSWKKDIPIEVCPISNQVLKLVSDLRNHPVATLMATGHPMVISSDDPAMFGAKGLSYDFYEVFMGIGGMKADLRTLKQLAMNSIKYSTLLESEKNTFMEIWKKRWDKFIADVATK

SEQ ID NO: 236 - protein, 482 aa, synthetic construct
  REGION 1..482: note = human ADA2 K267P, mature numbering
IDETRAHLLLKEKMMRLGGRLVLNTKEELANERLMTLKIAEMKEAMRTLIFPPSMHFFQAKHLIERSQVFNILRMMPKGAALHLHDIGIVTMDWLVRNVTYRPHCHICFTPRGIMQFRFAHPTPRPSEKCSKWILLEDYRKRVQNVTEFDDSLLRNFTLVTQHPEVIYTNQNVVWSKFETIFFTISGLIHYAPVFRDYVFRSMQEFYEDNVLYMEIRARLLPVYELSGEHHDEEWSVKTYQEVAQKFVETHPEFIGIKIIYSDHRSPDVAVIAESIRMAMGLRIKFPTVVAGFDLVGHEDTGHSLHDYKEALMIPAKDGVKLPYFFHAGETDWQGTSIDRNILDALMLNTTRIGHGFALSKHPAVRTYSWKKDIPIEVCPISNQVLKLVSDLRNHPVATLMATGHPMVISSDDPAMFGAKGLSYDFYEVFMGIGGMKADLRTLKQLAMNSIKYSTLLESEKNTFMEIWKKRWDKFIADVATK

SEQ ID NO: 237 - protein, 482 aa, synthetic construct
  REGION 1..482: note = human ADA2 K267Q, mature numbering
IDETRAHLLLKEKMMRLGGRLVLNTKEELANERLMTLKIAEMKEAMRTLIFPPSMHFFQAKHLIERSQVFNILRMMPKGAALHLHDIGIVTMDWLVRNVTYRPHCHICFTPRGIMQFRFAHPTPRPSEKCSKWILLEDYRKRVQNVTEFDDSLLRNFTLVTQHPEVIYTNQNVVWSKFETIFFTISGLIHYAPVFRDYVFRSMQEFYEDNVLYMEIRARLLPVYELSGEHHDEEWSVKTYQEVAQKFVETHPEFIGIKIIYSDHRSQDVAVIAESIRMAMGLRIKFPTVVAGFDLVGHEDTGHSLHDYKEALMIPAKDGVKLPYFFHAGETDWQGTSIDRNILDALMLNTTRIGHGFALSKHPAVRTYSWKKDIPIEVCPISNQVLKLVSDLRNHPVATLMATGHPMVISSDDPAMFGAKGLSYDFYEVFMGIGGMKADLRTLKQLAMNSIKYSTLLESEKNTFMEIWKKRWDKFIADVATK

SEQ ID NO: 238 - protein, 482 aa, synthetic construct
  REGION 1..482: note = human ADA2 K267R, mature numbering
IDETRAHLLLKEKMMRLGGRLVLNTKEELANERLMTLKIAEMKEAMRTLIFPPSMHFFQAKHLIERSQVFNILRMMPKGAALHLHDIGIVTMDWLVRNVTYRPHCHICFTPRGIMQFRFAHPTPRPSEKCSKWILLEDYRKRVQNVTEFDDSLLRNFTLVTQHPEVIYTNQNVVWSKFETIFFTISGLIHYAPVFRDYVFRSMQEFYEDNVLYMEIRARLLPVYELSGEHHDEEWSVKTYQEVAQKFVETHPEFIGIKIIYSDHRSRDVAVIAESIRMAMGLRIKFPTVVAGFDLVGHEDTGHSLHDYKEALMIPAKDGVKLPYFFHAGETDWQGTSIDRNILDALMLNTTRIGHGFALSKHPAVRTYSWKKDIPIEVCPISNQVLKLVSDLRNHPVATLMATGHPMVISSDDPAMFGAKGLSYDFYEVFMGIGGMKADLRTLKQLAMNSIKYSTLLESEKNTFMEIWKKRWDKFIADVATK

SEQ ID NO: 239 - protein, 482 aa, synthetic construct
  REGION 1..482: note = human ADA2 K267S, mature numbering
IDETRAHLLLKEKMMRLGGRLVLNTKEELANERLMTLKIAEMKEAMRTLIFPPSMHFFQAKHLIERSQVFNILRMMPKGAALHLHDIGIVTMDWLVRNVTYRPHCHICFTPRGIMQFRFAHPTPRPSEKCSKWILLEDYRKRVQNVTEFDDSLLRNFTLVTQHPEVIYTNQNVVWSKFETIFFTISGLIHYAPVFRDYVFRSMQEFYEDNVLYMEIRARLLPVYELSGEHHDEEWSVKTYQEVAQKFVETHPEFIGIKIIYSDHRSSDVAVIAESIRMAMGLRIKFPTVVAGFDLVGHEDTGHSLHDYKEALMIPAKDGVKLPYFFHAGETDWQGTSIDRNILDALMLNTTRIGHGFALSKHPAVRTYSWKKDIPIEVCPISNQVLKLVSDLRNHPVATLMATGHPMVISSDDPAMFGAKGLSYDFYEVFMGIGGMKADLRTLKQLAMNSIKYSTLLESEKNTFMEIWKKRWDKFIADVATK

SEQ ID NO: 240 - protein, 482 aa, synthetic construct
  REGION 1..482: note = human ADA2 K267T, mature numbering
IDETRAHLLLKEKMMRLGGRLVLNTKEELANERLMTLKIAEMKEAMRTLIFPPSMHFFQAKHLIERSQVFNILRMMPKGAALHLHDIGIVTMDWLVRNVTYRPHCHICFTPRGIMQFRFAHPTPRPSEKCSKWILLEDYRKRVQNVTEFDDSLLRNFTLVTQHPEVIYTNQNVVWSKFETIFFTISGLIHYAPVFRDYVFRSMQEFYEDNVLYMEIRARLLPVYELSGEHHDEEWSVKTYQEVAQKFVETHPEFIGIKIIYSDHRSTDVAVIAESIRMAMGLRIKFPTVVAGFDLVGHEDTGHSLHDYKEALMIPAKDGVKLPYFFHAGETDWQGTSIDRNILDALMLNTTRIGHGFALSKHPAVRTYSWKKDIPIEVCPISNQVLKLVSDLRNHPVATLMATGHPMVISSDDPAMFGAKGLSYDFYEVFMGIGGMKADLRTLKQLAMNSIKYSTLLESEKNTFMEIWKKRWDKFIADVATK

SEQ ID NO: 241 - protein, 482 aa, synthetic construct
  REGION 1..482: note = human ADA2 K267V, mature numbering
IDETRAHLLLKEKMMRLGGRLVLNTKEELANERLMTLKIAEMKEAMRTLIFPPSMHFFQAKHLIERSQVFNILRMMPKGAALHLHDIGIVTMDWLVRNVTYRPHCHICFTPRGIMQFRFAHPTPRPSEKCSKWILLEDYRKRVQNVTEFDDSLLRNFTLVTQHPEVIYTNQNVVWSKFETIFFTISGLIHYAPVFRDYVFRSMQEFYEDNVLYMEIRARLLPVYELSGEHHDEEWSVKTYQEVAQKFVETHPEFIGIKIIYSDHRSVDVAVIAESIRMAMGLRIKFPTVVAGFDLVGHEDTGHSLHDYKEALMIPAKDGVKLPYFFHAGETDWQGTSIDRNILDALMLNTTRIGHGFALSKHPAVRTYSWKKDIPIEVCPISNQVLKLVSDLRNHPVATLMATGHPMVISSDDPAMFGAKGLSYDFYEVFMGIGGMKADLRTLKQLAMNSIKYSTLLESEKNTFMEIWKKRWDKFIADVATK

SEQ ID NO: 242 - protein, 482 aa, synthetic construct
  REGION 1..482: note = human ADA2 K267W, mature numbering
IDETRAHLLLKEKMMRLGGRLVLNTKEELANERLMTLKIAEMKEAMRTLIFPPSMHFFQAKHLIERSQVFNILRMMPKGAALHLHDIGIVTMDWLVRNVTYRPHCHICFTPRGIMQFRFAHPTPRPSEKCSKWILLEDYRKRVQNVTEFDDSLLRNFTLVTQHPEVIYTNQNVVWSKFETIFFTISGLIHYAPVFRDYVFRSMQEFYEDNVLYMEIRARLLPVYELSGEHHDEEWSVKTYQEVAQKFVETHPEFIGIKIIYSDHRSWDVAVIAESIRMAMGLRIKFPTVVAGFDLVGHEDTGHSLHDYKEALMIPAKDGVKLPYFFHAGETDWQGTSIDRNILDALMLNTTRIGHGFALSKHPAVRTYSWKKDIPIEVCPISNQVLKLVSDLRNHPVATLMATGHPMVISSDDPAMFGAKGLSYDFYEVFMGIGGMKADLRTLKQLAMNSIKYSTLLESEKNTFMEIWKKRWDKFIADVATK

SEQ ID NO: 243 - protein, 482 aa, synthetic construct
  REGION 1..482: note = human ADA2 K267Y, mature numbering
IDETRAHLLLKEKMMRLGGRLVLNTKEELANERLMTLKIAEMKEAMRTLIFPPSMHFFQAKHLIERSQVFNILRMMPKGAALHLHDIGIVTMDWLVRNVTYRPHCHICFTPRGIMQFRFAHPTPRPSEKCSKWILLEDYRKRVQNVTEFDDSLLRNFTLVTQHPEVIYTNQNVVWSKFETIFFTISGLIHYAPVFRDYVFRSMQEFYEDNVLYMEIRARLLPVYELSGEHHDEEWSVKTYQEVAQKFVETHPEFIGIKIIYSDHRSYDVAVIAESIRMAMGLRIKFPTVVAGFDLVGHEDTGHSLHDYKEALMIPAKDGVKLPYFFHAGETDWQGTSIDRNILDALMLNTTRIGHGFALSKHPAVRTYSWKKDIPIEVCPISNQVLKLVSDLRNHPVATLMATGHPMVISSDDPAMFGAKGLSYDFYEVFMGIGGMKADLRTLKQLAMNSIKYSTLLESEKNTFMEIWKKRWDKFIADVATK

SEQ ID NO: 244 - protein, 482 aa, synthetic construct
  REGION 1..482: note = human ADA2 V296A, mature numbering
IDETRAHLLLKEKMMRLGGRLVLNTKEELANERLMTLKIAEMKEAMRTLIFPPSMHFFQAKHLIERSQVFNILRMMPKGAALHLHDIGIVTMDWLVRNVTYRPHCHICFTPRGIMQFRFAHPTPRPSEKCSKWILLEDYRKRVQNVTEFDDSLLRNFTLVTQHPEVIYTNQNVVWSKFETIFFTISGLIHYAPVFRDYVFRSMQEFYEDNVLYMEIRARLLPVYELSGEHHDEEWSVKTYQEVAQKFVETHPEFIGIKIIYSDHRSKDVAVIAESIRMAMGLRIKFPTVVAGFDLAGHEDTGHSLHDYKEALMIPAKDGVKLPYFFHAGETDWQGTSIDRNILDALMLNTTRIGHGFALSKHPAVRTYSWKKDIPIEVCPISNQVLKLVSDLRNHPVATLMATGHPMVISSDDPAMFGAKGLSYDFYEVFMGIGGMKADLRTLKQLAMNSIKYSTLLESEKNTFMEIWKKRWDKFIADVATK

SEQ ID NO: 245 - protein, 482 aa, synthetic construct
  REGION 1..482: note = human ADA2 V296C, mature numbering
IDETRAHLLLKEKMMRLGGRLVLNTKEELANERLMTLKIAEMKEAMRTLIFPPSMHFFQAKHLIERSQVFNILRMMPKGAALHLHDIGIVTMDWLVRNVTYRPHCHICFTPRGIMQFRFAHPTPRPSEKCSKWILLEDYRKRVQNVTEFDDSLLRNFTLVTQHPEVIYTNQNVVWSKFETIFFTISGLIHYAPVFRDYVFRSMQEFYEDNVLYMEIRARLLPVYELSGEHHDEEWSVKTYQEVAQKFVETHPEFIGIKIIYSDHRSKDVAVIAESIRMAMGLRIKFPTVVAGFDLCGHEDTGHSLHDYKEALMIPAKDGVKLPYFFHAGETDWQGTSIDRNILDALMLNTTRIGHGFALSKHPAVRTYSWKKDIPIEVCPISNQVLKLVSDLRNHPVATLMATGHPMVISSDDPAMFGAKGLSYDFYEVFMGIGGMKADLRTLKQLAMNSIKYSTLLESEKNTFMEIWKKRWDKFIADVATK

SEQ ID NO: 246 - protein, 482 aa, synthetic construct
  REGION 1..482: note = human ADA2 V296D, mature numbering
IDETRAHLLLKEKMMRLGGRLVLNTKEELANERLMTLKIAEMKEAMRTLIFPPSMHFFQAKHLIERSQVFNILRMMPKGAALHLHDIGIVTMDWLVRNVTYRPHCHICFTPRGIMQFRFAHPTPRPSEKCSKWILLEDYRKRVQNVTEFDDSLLRNFTLVTQHPEVIYTNQNVVWSKFETIFFTISGLIHYAPVFRDYVFRSMQEFYEDNVLYMEIRARLLPVYELSGEHHDEEWSVKTYQEVAQKFVETHPEFIGIKIIYSDHRSKDVAVIAESIRMAMGLRIKFPTVVAGFDLDGHEDTGHSLHDYKEALMIPAKDGVKLPYFFHAGETDWQGTSIDRNILDALMLNTTRIGHGFALSKHPAVRTYSWKKDIPIEVCPISNQVLKLVSDLRNHPVATLMATGHPMVISSDDPAMFGAKGLSYDFYEVFMGIGGMKADLRTLKQLAMNSIKYSTLLESEKNTFMEIWKKRWDKFIADVATK

SEQ ID NO: 247 - protein, 482 aa, synthetic construct
  REGION 1..482: note = human ADA2 V296E, mature numbering
IDETRAHLLLKEKMMRLGGRLVLNTKEELANERLMTLKIAEMKEAMRTLIFPPSMHFFQAKHLIERSQVFNILRMMPKGAALHLHDIGIVTMDWLVRNVTYRPHCHICFTPRGIMQFRFAHPTPRPSEKCSKWILLEDYRKRVQNVTEFDDSLLRNFTLVTQHPEVIYTNQNVVWSKFETIFFTISGLIHYAPVFRDYVFRSMQEFYEDNVLYMEIRARLLPVYELSGEHHDEEWSVKTYQEVAQKFVETHPEFIGIKIIYSDHRSKDVAVIAESIRMAMGLRIKFPTVVAGFDLEGHEDTGHSLHDYKEALMIPAKDGVKLPYFFHAGETDWQGTSIDRNILDALMLNTTRIGHGFALSKHPAVRTYSWKKDIPIEVCPISNQVLKLVSDLRNHPVATLMATGHPMVISSDDPAMFGAKGLSYDFYEVFMGIGGMKADLRTLKQLAMNSIKYSTLLESEKNTFMEIWKKRWDKFIADVATK

SEQ ID NO: 248 - protein, 482 aa, synthetic construct
  REGION 1..482: note = human ADA2 V296F, mature numbering
IDETRAHLLLKEKMMRLGGRLVLNTKEELANERLMTLKIAEMKEAMRTLIFPPSMHFFQAKHLIERSQVFNILRMMPKGAALHLHDIGIVTMDWLVRNVTYRPHCHICFTPRGIMQFRFAHPTPRPSEKCSKWILLEDYRKRVQNVTEFDDSLLRNFTLVTQHPEVIYTNQNVVWSKFETIFFTISGLIHYAPVFRDYVFRSMQEFYEDNVLYMEIRARLLPVYELSGEHHDEEWSVKTYQEVAQKFVETHPEFIGIKIIYSDHRSKDVAVIAESIRMAMGLRIKFPTVVAGFDLFGHEDTGHSLHDYKEALMIPAKDGVKLPYFFHAGETDWQGTSIDRNILDALMLNTTRIGHGFALSKHPAVRTYSWKKDIPIEVCPISNQVLKLVSDLRNHPVATLMATGHPMVISSDDPAMFGAKGLSYDFYEVFMGIGGMKADLRTLKQLAMNSIKYSTLLESEKNTFMEIWKKRWDKFIADVATK

SEQ ID NO: 249 - protein, 482 aa, synthetic construct
  REGION 1..482: note = human ADA2 V296G, mature numbering
IDETRAHLLLKEKMMRLGGRLVLNTKEELANERLMTLKIAEMKEAMRTLIFPPSMHFFQAKHLIERSQVFNILRMMPKGAALHLHDIGIVTMDWLVRNVTYRPHCHICFTPRGIMQFRFAHPTPRPSEKCSKWILLEDYRKRVQNVTEFDDSLLRNFTLVTQHPEVIYTNQNVVWSKFETIFFTISGLIHYAPVFRDYVFRSMQEFYEDNVLYMEIRARLLPVYELSGEHHDEEWSVKTYQEVAQKFVETHPEFIGIKIIYSDHRSKDVAVIAESIRMAMGLRIKFPTVVAGFDLGGHEDTGHSLHDYKEALMIPAKDGVKLPYFFHAGETDWQGTSIDRNILDALMLNTTRIGHGFALSKHPAVRTYSWKKDIPIEVCPISNQVLKLVSDLRNHPVATLMATGHPMVISSDDPAMFGAKGLSYDFYEVFMGIGGMKADLRTLKQLAMNSIKYSTLLESEKNTFMEIWKKRWDKFIADVATK

SEQ ID NO: 250 - protein, 482 aa, synthetic construct
  REGION 1..482: note = human ADA2 V296H, mature numbering
IDETRAHLLLKEKMMRLGGRLVLNTKEELANERLMTLKIAEMKEAMRTLIFPPSMHFFQAKHLIERSQVFNILRMMPKGAALHLHDIGIVTMDWLVRNVTYRPHCHICFTPRGIMQFRFAHPTPRPSEKCSKWILLEDYRKRVQNVTEFDDSLLRNFTLVTQHPEVIYTNQNVVWSKFETIFFTISGLIHYAPVFRDYVFRSMQEFYEDNVLYMEIRARLLPVYELSGEHHDEEWSVKTYQEVAQKFVETHPEFIGIKIIYSDHRSKDVAVIAESIRMAMGLRIKFPTVVAGFDLHGHEDTGHSLHDYKEALMIPAKDGVKLPYFFHAGETDWQGTSIDRNILDALMLNTTRIGHGFALSKHPAVRTYSWKKDIPIEVCPISNQVLKLVSDLRNHPVATLMATGHPMVISSDDPAMFGAKGLSYDFYEVFMGIGGMKADLRTLKQLAMNSIKYSTLLESEKNTFMEIWKKRWDKFIADVATK

SEQ ID NO: 251 - protein, 482 aa, synthetic construct
  REGION 1..482: note = human ADA2 V296I, mature numbering
IDETRAHLLLKEKMMRLGGRLVLNTKEELANERLMTLKIAEMKEAMRTLIFPPSMHFFQAKHLIERSQVFNILRMMPKGAALHLHDIGIVTMDWLVRNVTYRPHCHICFTPRGIMQFRFAHPTPRPSEKCSKWILLEDYRKRVQNVTEFDDSLLRNFTLVTQHPEVIYTNQNVVWSKFETIFFTISGLIHYAPVFRDYVFRSMQEFYEDNVLYMEIRARLLPVYELSGEHHDEEWSVKTYQEVAQKFVETHPEFIGIKIIYSDHRSKDVAVIAESIRMAMGLRIKFPTVVAGFDLIGHEDTGHSLHDYKEALMIPAKDGVKLPYFFHAGETDWQGTSIDRNILDALMLNTTRIGHGFALSKHPAVRTYSWKKDIPIEVCPISNQVLKLVSDLRNHPVATLMATGHPMVISSDDPAMFGAKGLSYDFYEVFMGIGGMKADLRTLKQLAMNSIKYSTLLESEKNTFMEIWKKRWDKFIADVATK

SEQ ID NO: 252 - protein, 482 aa, synthetic construct
  REGION 1..482: note = human ADA2 V296K, mature numbering
IDETRAHLLLKEKMMRLGGRLVLNTKEELANERLMTLKIAEMKEAMRTLIFPPSMHFFQAKHLIERSQVFNILRMMPKGAALHLHDIGIVTMDWLVRNVTYRPHCHICFTPRGIMQFRFAHPTPRPSEKCSKWILLEDYRKRVQNVTEFDDSLLRNFTLVTQHPEVIYTNQNVVWSKFETIFFTISGLIHYAPVFRDYVFRSMQEFYEDNVLYMEIRARLLPVYELSGEHHDEEWSVKTYQEVAQKFVETHPEFIGIKIIYSDHRSKDVAVIAESIRMAMGLRIKFPTVVAGFDLKGHEDTGHSLHDYKEALMIPAKDGVKLPYFFHAGETDWQGTSIDRNILDALMLNTTRIGHGFALSKHPAVRTYSWKKDIPIEVCPISNQVLKLVSDLRNHPVATLMATGHPMVISSDDPAMFGAKGLSYDFYEVFMGIGGMKADLRTLKQLAMNSIKYSTLLESEKNTFMEIWKKRWDKFIADVATK

SEQ ID NO: 253 - protein, 482 aa, synthetic construct
  REGION 1..482: note = human ADA2 V296L, mature numbering
IDETRAHLLLKEKMMRLGGRLVLNTKEELANERLMTLKIAEMKEAMRTLIFPPSMHFFQAKHLIERSQVFNILRMMPKGAALHLHDIGIVTMDWLVRNVTYRPHCHICFTPRGIMQFRFAHPTPRPSEKCSKWILLEDYRKRVQNVTEFDDSLLRNFTLVTQHPEVIYTNQNVVWSKFETIFFTISGLIHYAPVFRDYVFRSMQEFYEDNVLYMEIRARLLPVYELSGEHHDEEWSVKTYQEVAQKFVETHPEFIGIKIIYSDHRSKDVAVIAESIRMAMGLRIKFPTVVAGFDLLGHEDTGHSLHDYKEALMIPAKDGVKLPYFFHAGETDWQGTSIDRNILDALMLNTTRIGHGFALSKHPAVRTYSWKKDIPIEVCPISNQVLKLVSDLRNHPVATLMATGHPMVISSDDPAMFGAKGLSYDFYEVFMGIGGMKADLRTLKQLAMNSIKYSTLLESEKNTFMEIWKKRWDKFIADVATK

SEQ ID NO: 254 - protein, 482 aa, synthetic construct
  REGION 1..482: note = human ADA2 V296M, mature numbering
IDETRAHLLLKEKMMRLGGRLVLNTKEELANERLMTLKIAEMKEAMRTLIFPPSMHFFQAKHLIERSQVFNILRMMPKGAALHLHDIGIVTMDWLVRNVTYRPHCHICFTPRGIMQFRFAHPTPRPSEKCSKWILLEDYRKRVQNVTEFDDSLLRNFTLVTQHPEVIYTNQNVVWSKFETIFFTISGLIHYAPVFRDYVFRSMQEFYEDNVLYMEIRARLLPVYELSGEHHDEEWSVKTYQEVAQKFVETHPEFIGIKIIYSDHRSKDVAVIAESIRMAMGLRIKFPTVVAGFDLMGHEDTGHSLHDYKEALMIPAKDGVKLPYFFHAGETDWQGTSIDRNILDALMLNTTRIGHGFALSKHPAVRTYSWKKDIPIEVCPISNQVLKLVSDLRNHPVATLMATGHPMVISSDDPAMFGAKGLSYDFYEVFMGIGGMKADLRTLKQLAMNSIKYSTLLESEKNTFMEIWKKRWDKFIADVATK

SEQ ID NO: 255 - protein, 482 aa, synthetic construct
  REGION 1..482: note = human ADA2 V296N, mature numbering
IDETRAHLLLKEKMMRLGGRLVLNTKEELANERLMTLKIAEMKEAMRTLIFPPSMHFFQAKHLIERSQVFNILRMMPKGAALHLHDIGIVTMDWLVRNVTYRPHCHICFTPRGIMQFRFAHPTPRPSEKCSKWILLEDYRKRVQNVTEFDDSLLRNFTLVTQHPEVIYTNQNVVWSKFETIFFTISGLIHYAPVFRDYVFRSMQEFYEDNVLYMEIRARLLPVYELSGEHHDEEWSVKTYQEVAQKFVETHPEFIGIKIIYSDHRSKDVAVIAESIRMAMGLRIKFPTVVAGFDLNGHEDTGHSLHDYKEALMIPAKDGVKLPYFFHAGETDWQGTSIDRNILDALMLNTTRIGHGFALSKHPAVRTYSWKKDIPIEVCPISNQVLKLVSDLRNHPVATLMATGHPMVISSDDPAMFGAKGLSYDFYEVFMGIGGMKADLRTLKQLAMNSIKYSTLLESEKNTFMEIWKKRWDKFIADVATK

SEQ ID NO: 256 - protein, 482 aa, synthetic construct
  REGION 1..482: note = human ADA2 V296P, mature numbering
IDETRAHLLLKEKMMRLGGRLVLNTKEELANERLMTLKIAEMKEAMRTLIFPPSMHFFQAKHLIERSQVFNILRMMPKGAALHLHDIGIVTMDWLVRNVTYRPHCHICFTPRGIMQFRFAHPTPRPSEKCSKWILLEDYRKRVQNVTEFDDSLLRNFTLVTQHPEVIYTNQNVVWSKFETIFFTISGLIHYAPVFRDYVFRSMQEFYEDNVLYMEIRARLLPVYELSGEHHDEEWSVKTYQEVAQKFVETHPEFIGIKIIYSDHRSKDVAVIAESIRMAMGLRIKFPTVVAGFDLPGHEDTGHSLHDYKEALMIPAKDGVKLPYFFHAGETDWQGTSIDRNILDALMLNTTRIGHGFALSKHPAVRTYSWKKDIPIEVCPISNQVLKLVSDLRNHPVATLMATGHPMVISSDDPAMFGAKGLSYDFYEVFMGIGGMKADLRTLKQLAMNSIKYSTLLESEKNTFMEIWKKRWDKFIADVATK

SEQ ID NO: 257 - protein, 482 aa, synthetic construct
  REGION 1..482: note = human ADA2 V296Q, mature numbering
IDETRAHLLLKEKMMRLGGRLVLNTKEELANERLMTLKIAEMKEAMRTLIFPPSMHFFQAKHLIERSQVFNILRMMPKGAALHLHDIGIVTMDWLVRNVTYRPHCHICFTPRGIMQFRFAHPTPRPSEKCSKWILLEDYRKRVQNVTEFDDSLLRNFTLVTQHPEVIYTNQNVVWSKFETIFFTISGLIHYAPVFRDYVFRSMQEFYEDNVLYMEIRARLLPVYELSGEHHDEEWSVKTYQEVAQKFVETHPEFIGIKIIYSDHRSKDVAVIAESIRMAMGLRIKFPTVVAGFDLQGHEDTGHSLHDYKEALMIPAKDGVKLPYFFHAGETDWQGTSIDRNILDALMLNTTRIGHGFALSKHPAVRTYSWKKDIPIEVCPISNQVLKLVSDLRNHPVATLMATGHPMVISSDDPAMFGAKGLSYDFYEVFMGIGGMKADLRTLKQLAMNSIKYSTLLESEKNTFMEIWKKRWDKFIADVATK

SEQ ID NO: 258 - protein, 482 aa, synthetic construct
  REGION 1..482: note = human ADA2 V296R, mature numbering
IDETRAHLLLKEKMMRLGGRLVLNTKEELANERLMTLKIAEMKEAMRTLIFPPSMHFFQAKHLIERSQVFNILRMMPKGAALHLHDIGIVTMDWLVRNVTYRPHCHICFTPRGIMQFRFAHPTPRPSEKCSKWILLEDYRKRVQNVTEFDDSLLRNFTLVTQHPEVIYTNQNVVWSKFETIFFTISGLIHYAPVFRDYVFRSMQEFYEDNVLYMEIRARLLPVYELSGEHHDEEWSVKTYQEVAQKFVETHPEFIGIKIIYSDHRSKDVAVIAESIRMAMGLRIKFPTVVAGFDLRGHEDTGHSLHDYKEALMIPAKDGVKLPYFFHAGETDWQGTSIDRNILDALMLNTTRIGHGFALSKHPAVRTYSWKKDIPIEVCPISNQVLKLVSDLRNHPVATLMATGHPMVISSDDPAMFGAKGLSYDFYEVFMGIGGMKADLRTLKQLAMNSIKYSTLLESEKNTFMEIWKKRWDKFIADVATK

SEQ ID NO: 259 - protein, 482 aa, synthetic construct
  REGION 1..482: note = human ADA2 V296S, mature numbering
IDETRAHLLLKEKMMRLGGRLVLNTKEELANERLMTLKIAEMKEAMRTLIFPPSMHFFQAKHLIERSQVFNILRMMPKGAALHLHDIGIVTMDWLVRNVTYRPHCHICFTPRGIMQFRFAHPTPRPSEKCSKWILLEDYRKRVQNVTEFDDSLLRNFTLVTQHPEVIYTNQNVVWSKFETIFFTISGLIHYAPVFRDYVFRSMQEFYEDNVLYMEIRARLLPVYELSGEHHDEEWSVKTYQEVAQKFVETHPEFIGIKIIYSDHRSKDVAVIAESIRMAMGLRIKFPTVVAGFDLSGHEDTGHSLHDYKEALMIPAKDGVKLPYFFHAGETDWQGTSIDRNILDALMLNTTRIGHGFALSKHPAVRTYSWKKDIPIEVCPISNQVLKLVSDLRNHPVATLMATGHPMVISSDDPAMFGAKGLSYDFYEVFMGIGGMKADLRTLKQLAMNSIKYSTLLESEKNTFMEIWKKRWDKFIADVATK

SEQ ID NO: 260 - protein, 482 aa, synthetic construct
  REGION 1..482: note = human ADA2 V296T, mature numbering
IDETRAHLLLKEKMMRLGGRLVLNTKEELANERLMTLKIAEMKEAMRTLIFPPSMHFFQAKHLIERSQVFNILRMMPKGAALHLHDIGIVTMDWLVRNVTYRPHCHICFTPRGIMQFRFAHPTPRPSEKCSKWILLEDYRKRVQNVTEFDDSLLRNFTLVTQHPEVIYTNQNVVWSKFETIFFTISGLIHYAPVFRDYVFRSMQEFYEDNVLYMEIRARLLPVYELSGEHHDEEWSVKTYQEVAQKFVETHPEFIGIKIIYSDHRSKDVAVIAESIRMAMGLRIKFPTVVAGFDLTGHEDTGHSLHDYKEALMIPAKDGVKLPYFFHAGETDWQGTSIDRNILDALMLNTTRIGHGFALSKHPAVRTYSWKKDIPIEVCPISNQVLKLVSDLRNHPVATLMATGHPMVISSDDPAMFGAKGLSYDFYEVFMGIGGMKADLRTLKQLAMNSIKYSTLLESEKNTFMEIWKKRWDKFIADVATK

SEQ ID NO: 261 - protein, 482 aa, synthetic construct
  REGION 1..482: note = human ADA2 V296W, mature numbering
IDETRAHLLLKEKMMRLGGRLVLNTKEELANERLMTLKIAEMKEAMRTLIFPPSMHFFQAKHLIERSQVFNILRMMPKGAALHLHDIGIVTMDWLVRNVTYRPHCHICFTPRGIMQFRFAHPTPRPSEKCSKWILLEDYRKRVQNVTEFDDSLLRNFTLVTQHPEVIYTNQNVVWSKFETIFFTISGLIHYAPVFRDYVFRSMQEFYEDNVLYMEIRARLLPVYELSGEHHDEEWSVKTYQEVAQKFVETHPEFIGIKIIYSDHRSKDVAVIAESIRMAMGLRIKFPTVVAGFDLWGHEDTGHSLHDYKEALMIPAKDGVKLPYFFHAGETDWQGTSIDRNILDALMLNTTRIGHGFALSKHPAVRTYSWKKDIPIEVCPISNQVLKLVSDLRNHPVATLMATGHPMVISSDDPAMFGAKGLSYDFYEVFMGIGGMKADLRTLKQLAMNSIKYSTLLESEKNTFMEIWKKRWDKFIADVATK

SEQ ID NO: 262 - protein, 482 aa, synthetic construct
  REGION 1..482: note = human ADA2 V296Y, mature numbering
IDETRAHLLLKEKMMRLGGRLVLNTKEELANERLMTLKIAEMKEAMRTLIFPPSMHFFQAKHLIERSQVFNILRMMPKGAALHLHDIGIVTMDWLVRNVTYRPHCHICFTPRGIMQFRFAHPTPRPSEKCSKWILLEDYRKRVQNVTEFDDSLLRNFTLVTQHPEVIYTNQNVVWSKFETIFFTISGLIHYAPVFRDYVFRSMQEFYEDNVLYMEIRARLLPVYELSGEHHDEEWSVKTYQEVAQKFVETHPEFIGIKIIYSDHRSKDVAVIAESIRMAMGLRIKFPTVVAGFDLYGHEDTGHSLHDYKEALMIPAKDGVKLPYFFHAGETDWQGTSIDRNILDALMLNTTRIGHGFALSKHPAVRTYSWKKDIPIEVCPISNQVLKLVSDLRNHPVATLMATGHPMVISSDDPAMFGAKGLSYDFYEVFMGIGGMKADLRTLKQLAMNSIKYSTLLESEKNTFMEIWKKRWDKFIADVATK

SEQ ID NO: 263 - protein, 482 aa, synthetic construct
  REGION 1..482: note = human ADA2 R219Q/K371E, mature numbering
IDETRAHLLLKEKMMRLGGRLVLNTKEELANERLMTLKIAEMKEAMRTLIFPPSMHFFQAKHLIERSQVFNILRMMPKGAALHLHDIGIVTMDWLVRNVTYRPHCHICFTPRGIMQFRFAHPTPRPSEKCSKWILLEDYRKRVQNVTEFDDSLLRNFTLVTQHPEVIYTNQNVVWSKFETIFFTISGLIHYAPVFRDYVFRSMQEFYEDNVLYMEIRAQLLPVYELSGEHHDEEWSVKTYQEVAQKFVETHPEFIGIKIIYSDHRSKDVAVIAESIRMAMGLRIKFPTVVAGFDLVGHEDTGHSLHDYKEALMIPAKDGVKLPYFFHAGETDWQGTSIDRNILDALMLNTTRIGHGFALSKHPAVRTYSWEKDIPIEVCPISNQVLKLVSDLRNHPVATLMATGHPMVISSDDPAMFGAKGLSYDFYEVFMGIGGMKADLRTLKQLAMNSIKYSTLLESEKNTFMEIWKKRWDKFIADVATK

SEQ ID NO: 264 - protein, 482 aa, synthetic construct
  REGION 1..482: note = human ADA2 R219Q/K371D, mature numbering
IDETRAHLLLKEKMMRLGGRLVLNTKEELANERLMTLKIAEMKEAMRTLIFPPSMHFFQAKHLIERSQVFNILRMMPKGAALHLHDIGIVTMDWLVRNVTYRPHCHICFTPRGIMQFRFAHPTPRPSEKCSKWILLEDYRKRVQNVTEFDDSLLRNFTLVTQHPEVIYTNQNVVWSKFETIFFTISGLIHYAPVFRDYVFRSMQEFYEDNVLYMEIRAQLLPVYELSGEHHDEEWSVKTYQEVAQKFVETHPEFIGIKIIYSDHRSKDVAVIAESIRMAMGLRIKFPTVVAGFDLVGHEDTGHSLHDYKEALMIPAKDGVKLPYFFHAGETDWQGTSIDRNILDALMLNTTRIGHGFALSKHPAVRTYSWDKDIPIEVCPISNQVLKLVSDLRNHPVATLMATGHPMVISSDDPAMFGAKGLSYDFYEVFMGIGGMKADLRTLKQLAMNSIKYSTLLESEKNTFMEIWKKRWDKFIADVATK

SEQ ID NO: 265 - protein, 482 aa, synthetic construct
  REGION 1..482: note = human ADA2 R219Q/R20E, mature numbering
IDETRAHLLLKEKMMRLGGELVLNTKEELANERLMTLKIAEMKEAMRTLIFPPSMHFFQAKHLIERSQVFNILRMMPKGAALHLHDIGIVTMDWLVRNVTYRPHCHICFTPRGIMQFRFAHPTPRPSEKCSKWILLEDYRKRVQNVTEFDDSLLRNFTLVTQHPEVIYTNQNVVWSKFETIFFTISGLIHYAPVFRDYVFRSMQEFYEDNVLYMEIRAQLLPVYELSGEHHDEEWSVKTYQEVAQKFVETHPEFIGIKIIYSDHRSKDVAVIAESIRMAMGLRIKFPTVVAGFDLVGHEDTGHSLHDYKEALMIPAKDGVKLPYFFHAGETDWQGTSIDRNILDALMLNTTRIGHGFALSKHPAVRTYSWKKDIPIEVCPISNQVLKLVSDLRNHPVATLMATGHPMVISSDDPAMFGAKGLSYDFYEVFMGIGGMKADLRTLKQLAMNSIKYSTLLESEKNTFMEIWKKRWDKFIADVATK

SEQ ID NO: 266 - protein, 482 aa, synthetic construct
  REGION 1..482: note = human ADA2 R219Q/K371E/R20E, mature numbering
IDETRAHLLLKEKMMRLGGELVLNTKEELANERLMTLKIAEMKEAMRTLIFPPSMHFFQAKHLIERSQVFNILRMMPKGAALHLHDIGIVTMDWLVRNVTYRPHCHICFTPRGIMQFRFAHPTPRPSEKCSKWILLEDYRKRVQNVTEFDDSLLRNFTLVTQHPEVIYTNQNVVWSKFETIFFTISGLIHYAPVFRDYVFRSMQEFYEDNVLYMEIRAQLLPVYELSGEHHDEEWSVKTYQEVAQKFVETHPEFIGIKIIYSDHRSKDVAVIAESIRMAMGLRIKFPTVVAGFDLVGHEDTGHSLHDYKEALMIPAKDGVKLPYFFHAGETDWQGTSIDRNILDALMLNTTRIGHGFALSKHPAVRTYSWEKDIPIEVCPISNQVLKLVSDLRNHPVATLMATGHPMVISSDDPAMFGAKGLSYDFYEVFMGIGGMKADLRTLKQLAMNSIKYSTLLESEKNTFMEIWKKRWDKFIADVATK

SEQ ID NO: 267 - protein, 482 aa, synthetic construct
  REGION 1..482: note = human ADA2 R219Q/K371D/R20E, mature numbering
IDETRAHLLLKEKMMRLGGELVLNTKEELANERLMTLKIAEMKEAMRTLIFPPSMHFFQAKHLIERSQVFNILRMMPKGAALHLHDIGIVTMDWLVRNVTYRPHCHICFTPRGIMQFRFAHPTPRPSEKCSKWILLEDYRKRVQNVTEFDDSLLRNFTLVTQHPEVIYTNQNVVWSKFETIFFTISGLIHYAPVFRDYVFRSMQEFYEDNVLYMEIRAQLLPVYELSGEHHDEEWSVKTYQEVAQKFVETHPEFIGIKIIYSDHRSKDVAVIAESIRMAMGLRIKFPTVVAGFDLVGHEDTGHSLHDYKEALMIPAKDGVKLPYFFHAGETDWQGTSIDRNILDALMLNTTRIGHGFALSKHPAVRTYSWDKDIPIEVCPISNQVLKLVSDLRNHPVATLMATGHPMVISSDDPAMFGAKGLSYDFYEVFMGIGGMKADLRTLKQLAMNSIKYSTLLESEKNTFMEIWKKRWDKFIADVATK

SEQ ID NO: 268 - protein, 482 aa, synthetic construct
  REGION 1..482: note = human ADA2 R219Q/S262N/K371E, mature numbering
IDETRAHLLLKEKMMRLGGRLVLNTKEELANERLMTLKIAEMKEAMRTLIFPPSMHFFQAKHLIERSQVFNILRMMPKGAALHLHDIGIVTMDWLVRNVTYRPHCHICFTPRGIMQFRFAHPTPRPSEKCSKWILLEDYRKRVQNVTEFDDSLLRNFTLVTQHPEVIYTNQNVVWSKFETIFFTISGLIHYAPVFRDYVFRSMQEFYEDNVLYMEIRAQLLPVYELSGEHHDEEWSVKTYQEVAQKFVETHPEFIGIKIIYNDHRSKDVAVIAESIRMAMGLRIKFPTVVAGFDLVGHEDTGHSLHDYKEALMIPAKDGVKLPYFFHAGETDWQGTSIDRNILDALMLNTTRIGHGFALSKHPAVRTYSWEKDIPIEVCPISNQVLKLVSDLRNHPVATLMATGHPMVISSDDPAMFGAKGLSYDFYEVFMGIGGMKADLRTLKQLAMNSIKYSTLLESEKNTFMEIWKKRWDKFIADVATK

SEQ ID NO: 269 - protein, 482 aa, synthetic construct
  REGION 1..482: note = human ADA2 R219Q/S262N/K371D, mature numbering
IDETRAHLLLKEKMMRLGGRLVLNTKEELANERLMTLKIAEMKEAMRTLIFPPSMHFFQAKHLIERSQVFNILRMMPKGAALHLHDIGIVTMDWLVRNVTYRPHCHICFTPRGIMQFRFAHPTPRPSEKCSKWILLEDYRKRVQNVTEFDDSLLRNFTLVTQHPEVIYTNQNVVWSKFETIFFTISGLIHYAPVFRDYVFRSMQEFYEDNVLYMEIRAQLLPVYELSGEHHDEEWSVKTYQEVAQKFVETHPEFIGIKIIYNDHRSKDVAVIAESIRMAMGLRIKFPTVVAGFDLVGHEDTGHSLHDYKEALMIPAKDGVKLPYFFHAGETDWQGTSIDRNILDALMLNTTRIGHGFALSKHPAVRTYSWDKDIPIEVCPISNQVLKLVSDLRNHPVATLMATGHPMVISSDDPAMFGAKGLSYDFYEVFMGIGGMKADLRTLKQLAMNSIKYSTLLESEKNTFMEIWKKRWDKFIADVATK

SEQ ID NO: 270 - protein, 482 aa, synthetic construct
  REGION 1..482: note = human ADA2 R219Q/S262N/R20E, mature numbering
IDETRAHLLLKEKMMRLGGELVLNTKEELANERLMTLKIAEMKEAMRTLIFPPSMHFFQAKHLIERSQVFNILRMMPKGAALHLHDIGIVTMDWLVRNVTYRPHCHICFTPRGIMQFRFAHPTPRPSEKCSKWILLEDYRKRVQNVTEFDDSLLRNFTLVTQHPEVIYTNQNVVWSKFETIFFTISGLIHYAPVFRDYVFRSMQEFYEDNVLYMEIRAQLLPVYELSGEHHDEEWSVKTYQEVAQKFVETHPEFIGIKIIYNDHRSKDVAVIAESIRMAMGLRIKFPTVVAGFDLVGHEDTGHSLHDYKEALMIPAKDGVKLPYFFHAGETDWQGTSIDRNILDALMLNTTRIGHGFALSKHPAVRTYSWKKDIPIEVCPISNQVLKLVSDLRNHPVATLMATGHPMVISSDDPAMFGAKGLSYDFYEVFMGIGGMKADLRTLKQLAMNSIKYSTLLESEKNTFMEIWKKRWDKFIADVATK

SEQ ID NO: 271 - protein, 482 aa, synthetic construct
  REGION 1..482: note = human ADA2 R219Q/S262N/K371E/R20E, maturenumbering
IDETRAHLLLKEKMMRLGGELVLNTKEELANERLMTLKIAEMKEAMRTLIFPPSMHFFQAKHLIERSQVFNILRMMPKGAALHLHDIGIVTMDWLVRNVTYRPHCHICFTPRGIMQFRFAHPTPRPSEKCSKWILLEDYRKRVQNVTEFDDSLLRNFTLVTQHPEVIYTNQNVVWSKFETIFFTISGLIHYAPVFRDYVFRSMQEFYEDNVLYMEIRAQLLPVYELSGEHHDEEWSVKTYQEVAQKFVETHPEFIGIKIIYNDHRSKDVAVIAESIRMAMGLRIKFPTVVAGFDLVGHEDTGHSLHDYKEALMIPAKDGVKLPYFFHAGETDWQGTSIDRNILDALMLNTTRIGHGFALSKHPAVRTYSWEKDIPIEVCPISNQVLKLVSDLRNHPVATLMATGHPMVISSDDPAMFGAKGLSYDFYEVFMGIGGMKADLRTLKQLAMNSIKYSTLLESEKNTFMEIWKKRWDKFIADVATK

SEQ ID NO: 272 - protein, 482 aa, synthetic construct
  REGION 1..482: note = human ADA2 R219Q/S262N/K371D/R20E, maturenumbering
IDETRAHLLLKEKMMRLGGELVLNTKEELANERLMTLKIAEMKEAMRTLIFPPSMHFFQAKHLIERSQVFNILRMMPKGAALHLHDIGIVTMDWLVRNVTYRPHCHICFTPRGIMQFRFAHPTPRPSEKCSKWILLEDYRKRVQNVTEFDDSLLRNFTLVTQHPEVIYTNQNVVWSKFETIFFTISGLIHYAPVFRDYVFRSMQEFYEDNVLYMEIRAQLLPVYELSGEHHDEEWSVKTYQEVAQKFVETHPEFIGIKIIYNDHRSKDVAVIAESIRMAMGLRIKFPTVVAGFDLVGHEDTGHSLHDYKEALMIPAKDGVKLPYFFHAGETDWQGTSIDRNILDALMLNTTRIGHGFALSKHPAVRTYSWDKDIPIEVCPISNQVLKLVSDLRNHPVATLMATGHPMVISSDDPAMFGAKGLSYDFYEVFMGIGGMKADLRTLKQLAMNSIKYSTLLESEKNTFMEIWKKRWDKFIADVATK

SEQ ID NO: 273 - protein, 482 aa, synthetic construct
  REGION 1..482: note = human ADA2 R219Q/S262N, mature numbering
IDETRAHLLLKEKMMRLGGRLVLNTKEELANERLMTLKIAEMKEAMRTLIFPPSMHFFQAKHLIERSQVFNILRMMPKGAALHLHDIGIVTMDWLVRNVTYRPHCHICFTPRGIMQFRFAHPTPRPSEKCSKWILLEDYRKRVQNVTEFDDSLLRNFTLVTQHPEVIYTNQNVVWSKFETIFFTISGLIHYAPVFRDYVFRSMQEFYEDNVLYMEIRAQLLPVYELSGEHHDEEWSVKTYQEVAQKFVETHPEFIGIKIIYNDHRSKDVAVIAESIRMAMGLRIKFPTVVAGFDLVGHEDTGHSLHDYKEALMIPAKDGVKLPYFFHAGETDWQGTSIDRNILDALMLNTTRIGHGFALSKHPAVRTYSWKKDIPIEVCPISNQVLKLVSDLRNHPVATLMATGHPMVISSDDPAMFGAKGLSYDFYEVFMGIGGMKADLRTLKQLAMNSIKYSTLLESEKNTFMEIWKKRWDKFIADVATK

SEQ ID NO: 274 - protein, 485 aa, synthetic construct
  REGION 1..485: note = human ADA2 I1insNAS, mature numbering
NASIDETRAHLLLKEKMMRLGGRLVLNTKEELANERLMTLKIAEMKEAMRTLIFPPSMHFFQAKHLIERSQVFNILRMMPKGAALHLHDIGIVTMDWLVRNVTYRPHCHICFTPRGIMQFRFAHPTPRPSEKCSKWILLEDYRKRVQNVTEFDDSLLRNFTLVTQHPEVIYTNQNVVWSKFETIFFTISGLIHYAPVFRDYVFRSMQEFYEDNVLYMEIRARLLPVYELSGEHHDEEWSVKTYQEVAQKFVETHPEFIGIKIIYSDHRSKDVAVIAESIRMAMGLRIKFPTVVAGFDLVGHEDTGHSLHDYKEALMIPAKDGVKLPYFFHAGETDWQGTSIDRNILDALMLNTTRIGHGFALSKHPAVRTYSWKKDIPIEVCPISNQVLKLVSDLRNHPVATLMATGHPMVISSDDPAMFGAKGLSYDFYEVFMGIGGMKADLRTLKQLAMNSIKYSTLLESEKNTFMEIWKKRWDKFIADVATK

SEQ ID NO: 275 - protein, 482 aa, synthetic construct
  REGION 1..482: note = human ADA2 R20N/V22S, mature numbering
IDETRAHLLLKEKMMRLGGNLVLNTKEELANERLMTLKIAEMKEAMRTLIFPPSMHFFQAKHLIERSQVFNILRMMPKGAALHLHDIGIVTMDWLVRNVTYRPHCHICFTPRGIMQFRFAHPTPRPSEKCSKWILLEDYRKRVQNVTEFDDSLLRNFTLVTQHPEVIYTNQNVVWSKFETIFFTISGLIHYAPVFRDYVFRSMQEFYEDNVLYMEIRARLLPVYELSGEHHDEEWSVKTYQEVAQKFVETHPEFIGIKIIYSDHRSKDVAVIAESIRMAMGLRIKFPTVVAGFDLVGHEDTGHSLHDYKEALMIPAKDGVKLPYFFHAGETDWQGTSIDRNILDALMLNTTRIGHGFALSKHPAVRTYSWKKDIPIEVCPISNQVLKLVSDLRNHPVATLMATGHPMVISSDDPAMFGAKGLSYDFYEVFMGIGGMKADLRTLKQLAMNSIKYSTLLESEKNTFMEIWKKRWDKFIADVATK

SEQ ID NO: 276 - protein, 482 aa, synthetic construct
  REGION 1..482: note = human ADA2 K371N/D373S, mature numbering
IDETRAHLLLKEKMMRLGGRLVLNTKEELANERLMTLKIAEMKEAMRTLIFPPSMHFFQAKHLIERSQVFNILRMMPKGAALHLHDIGIVTMDWLVRNVTYRPHCHICFTPRGIMQFRFAHPTPRPSEKCSKWILLEDYRKRVQNVTEFDDSLLRNFTLVTQHPEVIYTNQNVVWSKFETIFFTISGLIHYAPVFRDYVFRSMQEFYEDNVLYMEIRARLLPVYELSGEHHDEEWSVKTYQEVAQKFVETHPEFIGIKIIYSDHRSKDVAVIAESIRMAMGLRIKFPTVVAGFDLVGHEDTGHSLHDYKEALMIPAKDGVKLPYFFHAGETDWQGTSIDRNILDALMLNTTRIGHGFALSKHPAVRTYSWNKSIPIEVCPISNQVLKLVSDLRNHPVATLMATGHPMVISSDDPAMFGAKGLSYDFYEVFMGIGGMKADLRTLKQLAMNSIKYSTLLESEKNTFMEIWKKRWDKFIADVATK

SEQ ID NO: 277 - protein, 482 aa, synthetic construct
  REGION 1..482: note = human ADA2 K372N/I374S, mature numbering
IDETRAHLLLKEKMMRLGGRLVLNTKEELANERLMTLKIAEMKEAMRTLIFPPSMHFFQAKHLIERSQVFNILRMMPKGAALHLHDIGIVTMDWLVRNVTYRPHCHICFTPRGIMQFRFAHPTPRPSEKCSKWILLEDYRKRVQNVTEFDDSLLRNFTLVTQHPEVIYTNQNVVWSKFETIFFTISGLIHYAPVFRDYVFRSMQEFYEDNVLYMEIRARLLPVYELSGEHHDEEWSVKTYQEVAQKFVETHPEFIGIKIIYSDHRSKDVAVIAESIRMAMGLRIKFPTVVAGFDLVGHEDTGHSLHDYKEALMIPAKDGVKLPYFFHAGETDWQGTSIDRNILDALMLNTTRIGHGFALSKHPAVRTYSWKNDSPIEVCPISNQVLKLVSDLRNHPVATLMATGHPMVISSDDPAMFGAKGLSYDFYEVFMGIGGMKADLRTLKQLAMNSIKYSTLLESEKNTFMEIWKKRWDKFIADVATK

SEQ ID NO: 278 - protein, 482 aa, synthetic construct
  REGION 1..482: note = human ADA2 T403N/H405S, mature numbering
IDETRAHLLLKEKMMRLGGRLVLNTKEELANERLMTLKIAEMKEAMRTLIFPPSMHFFQAKHLIERSQVFNILRMMPKGAALHLHDIGIVTMDWLVRNVTYRPHCHICFTPRGIMQFRFAHPTPRPSEKCSKWILLEDYRKRVQNVTEFDDSLLRNFTLVTQHPEVIYTNQNVVWSKFETIFFTISGLIHYAPVFRDYVFRSMQEFYEDNVLYMEIRARLLPVYELSGEHHDEEWSVKTYQEVAQKFVETHPEFIGIKIIYSDHRSKDVAVIAESIRMAMGLRIKFPTVVAGFDLVGHEDTGHSLHDYKEALMIPAKDGVKLPYFFHAGETDWQGTSIDRNILDALMLNTTRIGHGFALSKHPAVRTYSWKKDIPIEVCPISNQVLKLVSDLRNHPVATLMANGSPMVISSDDPAMFGAKGLSYDFYEVFMGIGGMKADLRTLKQLAMNSIKYSTLLESEKNTFMEIWKKRWDKFIADVATK

SEQ ID NO: 279 - protein, 482 aa, synthetic construct
  REGION 1..482: note = human ADA2 G404N/P406S, mature numbering
IDETRAHLLLKEKMMRLGGRLVLNTKEELANERLMTLKIAEMKEAMRTLIFPPSMHFFQAKHLIERSQVFNILRMMPKGAALHLHDIGIVTMDWLVRNVTYRPHCHICFTPRGIMQFRFAHPTPRPSEKCSKWILLEDYRKRVQNVTEFDDSLLRNFTLVTQHPEVIYTNQNVVWSKFETIFFTISGLIHYAPVFRDYVFRSMQEFYEDNVLYMEIRARLLPVYELSGEHHDEEWSVKTYQEVAQKFVETHPEFIGIKIIYSDHRSKDVAVIAESIRMAMGLRIKFPTVVAGFDLVGHEDTGHSLHDYKEALMIPAKDGVKLPYFFHAGETDWQGTSIDRNILDALMLNTTRIGHGFALSKHPAVRTYSWKKDIPIEVCPISNQVLKLVSDLRNHPVATLMATNHSMVISSDDPAMFGAKGLSYDFYEVFMGIGGMKADLRTLKQLAMNSIKYSTLLESEKNTFMEIWKKRWDKFIADVATK

SEQ ID NO: 280 - protein, 440 aa, synthetic construct
  REGION 1..440: note = human ADA2 C105-T147del->(Gly)n, mature numbering,where n = 2 to 20
  REPEAT 105: note = occurring 2, 3, 4, 5, 6, 7, 8, 9, 10, 11, 12, 13,14, 15, 16, 17, 18, 19 or 20 times
IDETRAHLLLKEKMMRLGGRLVLNTKEELANERLMTLKIAEMKEAMRTLIFPPSMHFFQAKHLIERSQVFNILRMMPKGAALHLHDIGIVTMDWLVRNVTYRPHGEFDDSLLRNFTLVTQHPEVIYTNQNVVWSKFETIFFTISGLIHYAPVFRDYVFRSMQEFYEDNVLYMEIRARLLPVYELSGEHHDEEWSVKTYQEVAQKFVETHPEFIGIKIIYSDHRSKDVAVIAESIRMAMGLRIKFPTVVAGFDLVGHEDTGHSLHDYKEALMIPAKDGVKLPYFFHAGETDWQGTSIDRNILDALMLNTTRIGHGFALSKHPAVRTYSWKKDIPIEVCPISNQVLKLVSDLRNHPVATLMATGHPMVISSDDPAMFGAKGLSYDFYEVFMGIGGMKADLRTLKQLAMNSIKYSTLLESEKNTFMEIWKKRWDKFIADVATK

SEQ ID NO: 281 - protein, 454 aa, synthetic construct
  REGION 1..454: note = human ADA2 C105-T147del->(Gly)15, mature numbering
IDETRAHLLLKEKMMRLGGRLVLNTKEELANERLMTLKIAEMKEAMRTLIFPPSMHFFQAKHLIERSQVFNILRMMPKGAALHLHDIGIVTMDWLVRNVTYRPHGGGGGGGGGGGGGGGEFDDSLLRNFTLVTQHPEVIYTNQNVVWSKFETIFFTISGLIHYAPVFRDYVFRSMQEFYEDNVLYMEIRARLLPVYELSGEHHDEEWSVKTYQEVAQKFVETHPEFIGIKIIYSDHRSKDVAVIAESIRMAMGLRIKFPTVVAGFDLVGHEDTGHSLHDYKEALMIPAKDGVKLPYFFHAGETDWQGTSIDRNILDALMLNTTRIGHGFALSKHPAVRTYSWKKDIPIEVCPISNQVLKLVSDLRNHPVATLMATGHPMVISSDDPAMFGAKGLSYDFYEVFMGIGGMKADLRTLKQLAMNSIKYSTLLESEKNTFMEIWKKRWDKFIADVATK

SEQ ID NO: 282 - protein, 449 aa, synthetic construct
  REGION 1..449: note = human ADA2 C105-T147del->(Gly)10, mature numbering
IDETRAHLLLKEKMMRLGGRLVLNTKEELANERLMTLKIAEMKEAMRTLIFPPSMHFFQAKHLIERSQVFNILRMMPKGAALHLHDIGIVTMDWLVRNVTYRPHGGGGGGGGGGEFDDSLLRNFTLVTQHPEVIYTNQNVVWSKFETIFFTISGLIHYAPVFRDYVFRSMQEFYEDNVLYMEIRARLLPVYELSGEHHDEEWSVKTYQEVAQKFVETHPEFIGIKIIYSDHRSKDVAVIAESIRMAMGLRIKFPTVVAGFDLVGHEDTGHSLHDYKEALMIPAKDGVKLPYFFHAGETDWQGTSIDRNILDALMLNTTRIGHGFALSKHPAVRTYSWKKDIPIEVCPISNQVLKLVSDLRNHPVATLMATGHPMVISSDDPAMFGAKGLSYDFYEVFMGIGGMKADLRTLKQLAMNSIKYSTLLESEKNTFMEIWKKRWDKFIADVATK

SEQ ID NO: 283 - protein, 446 aa, synthetic construct
  REGION 1..446: note = human ADA2 C105-T147del->(Gly)7, mature numbering
IDETRAHLLLKEKMMRLGGRLVLNTKEELANERLMTLKIAEMKEAMRTLIFPPSMHFFQAKHLIERSQVFNILRMMPKGAALHLHDIGIVTMDWLVRNVTYRPHGGGGGGGEFDDSLLRNFTLVTQHPEVIYTNQNVVWSKFETIFFTISGLIHYAPVFRDYVFRSMQEFYEDNVLYMEIRARLLPVYELSGEHHDEEWSVKTYQEVAQKFVETHPEFIGIKIIYSDHRSKDVAVIAESIRMAMGLRIKFPTVVAGFDLVGHEDTGHSLHDYKEALMIPAKDGVKLPYFFHAGETDWQGTSIDRNILDALMLNTTRIGHGFALSKHPAVRTYSWKKDIPIEVCPISNQVLKLVSDLRNHPVATLMATGHPMVISSDDPAMFGAKGLSYDFYEVFMGIGGMKADLRTLKQLAMNSIKYSTLLESEKNTFMEIWKKRWDKFIADVATK

SEQ ID NO: 284 - protein, 444 aa, synthetic construct
  REGION 1..444: note = human ADA2 C105-T147del->(Gly)5, mature numbering
IDETRAHLLLKEKMMRLGGRLVLNTKEELANERLMTLKIAEMKEAMRTLIFPPSMHFFQAKHLIERSQVFNILRMMPKGAALHLHDIGIVTMDWLVRNVTYRPHGGGGGEFDDSLLRNFTLVTQHPEVIYTNQNVVWSKFETIFFTISGLIHYAPVFRDYVFRSMQEFYEDNVLYMEIRARLLPVYELSGEHHDEEWSVKTYQEVAQKFVETHPEFIGIKIIYSDHRSKDVAVIAESIRMAMGLRIKFPTVVAGFDLVGHEDTGHSLHDYKEALMIPAKDGVKLPYFFHAGETDWQGTSIDRNILDALMLNTTRIGHGFALSKHPAVRTYSWKKDIPIEVCPISNQVLKLVSDLRNHPVATLMATGHPMVISSDDPAMFGAKGLSYDFYEVFMGIGGMKADLRTLKQLAMNSIKYSTLLESEKNTFMEIWKKRWDKFIADVATK

SEQ ID NO: 285 - protein, 442 aa, synthetic construct
  REGION 1..442: note = human ADA2 C105-T147del->(Gly)3, mature numbering
IDETRAHLLLKEKMMRLGGRLVLNTKEELANERLMTLKIAEMKEAMRTLIFPPSMHFFQAKHLIERSQVFNILRMMPKGAALHLHDIGIVTMDWLVRNVTYRPHGGGEFDDSLLRNFTLVTQHPEVIYTNQNVVWSKFETIFFTISGLIHYAPVFRDYVFRSMQEFYEDNVLYMEIRARLLPVYELSGEHHDEEWSVKTYQEVAQKFVETHPEFIGIKIIYSDHRSKDVAVIAESIRMAMGLRIKFPTVVAGFDLVGHEDTGHSLHDYKEALMIPAKDGVKLPYFFHAGETDWQGTSIDRNILDALMLNTTRIGHGFALSKHPAVRTYSWKKDIPIEVCPISNQVLKLVSDLRNHPVATLMATGHPMVISSDDPAMFGAKGLSYDFYEVFMGIGGMKADLRTLKQLAMNSIKYSTLLESEKNTFMEIWKKRWDKFIADVATK

SEQ ID NO: 286 - protein, 511 aa, Pan troglodytes
  REGION 1..511: note = ADA2 (CECR1)
  SIGNAL 1..29
MLVDGPSERPALCFLLLAVAMSFFGSALSIDETRAHLLLKEKMMRLGGRLVLNTKEELANERLMTLKIAEMKEAMRTLIFPPSMHFFQAKHLIERSQVFNILRMMPKGAALHLHDIGIVTMDWLVRNVTYRPHCHICFTPRGIMQFRFAHPTPRTSEKCSKWILLEDYRKRVQNVTEFDDSLLRNFTLVTQHPEVIYTNQNVVWSKFETIFFTISGLIHYAPVFRDYVFRSMQEFYEDNVLYMEIRARLLPVYELSGEHHDEEWSVKTYQEVAQKFVETHPEFIGIKIIYSDHRSKDVAVIAESIRTAMGLRTKFPTVVAGFDLVGHEDTGHSLHDYKEALMIPAKVGVKLPYFFHAGETDWQGTSIDRNILDALMLNTSRIGHGFALSKHPAVRTYSWKKDIPIEVCPISNQVLKLVSDLRNHPVATLMATGHPMVISSDDPAMFGAKGLSYDFYEVFMGIGGMKADLRTLKQLAMNSIKYSTLLESEKNTFMEIWKKRWDKFIADVATK

SEQ ID NO: 287 - protein, 511 aa, Gorilla gorilla
  REGION 1..511: note = ADA2 (CECR1)
  SIGNAL 1..29
MLVDGPSERPALRFLLLAVAMSFFGSALSIDETRAHLLLKEKMMRLGGRLVLNTKEELANERLMTLKIAEMKEAMRTLIFPPSMHFFQAKHLIERSQVFNVLRMMPKGAALHLHDIGIVTMDWLVRNVTYRPHCHICFTPRGIMQFRFAHPTPRTSEKCSKWILLEDYRKQVQNVTEFDDSLLRNFTLVTQHPEVIYTNQNVVWSKFENIFFTISGLIHYAPVFRDYVFRSMQEFYEDNVLYMEIRARLLPVYELSGEHHDEEWSVKTYQEVAQKFVETHPEFIGIKIIYSDHRSKDVAVIAESIRTAMGLRTKFPTVVAGFDLVGHEDTGHSLHDYKEALMIPAKDGVKLPYFFHAGETDWQGTSIDRNILDALMLNTTRIGHGFALSKHPAVRTYSWKKDIPIEVCPISNQVLKLVSDLRNHPVATLMATGHPMVISSDDPAMFGAKGLSYDFYEVFMGIGGMKADLRTLKQLAMNSIKYSTLLESEKNTFMEIWKKRWDKFIADVATK

SEQ ID NO: 288 - protein, 511 aa, Pan paniscus
  REGION 1..511: note = ADA2 (CECR1)
  SIGNAL 1..29
MLVDGPSERPALCFLLLAVAMSFFSSALSIDETRAHLLLKEKMMRLGGRLVLNTKEELANERLMTLKIAEMKEAMRTLIFPPSMHFFQAKHLIERSQVFNILRMMPKGAALHLHDIGIVTMDWLVRNVTYRPHCHICFTPRGIMQFRFAHPTPRTSEKCSKWILLEDYRKRVQNVTEFDDSLLRNFTLVTQHPEVIYTNQNVVWSKFETIFFTISGLIHYAPVFRDYVFRSMQEFYEDNVLYMEIRARLLPVYELSGEHHDEEWSVKTYQEVAQKFVETHPEFIGIKIIYSDHRSKDVAVIAESIRTAMGLRTKFPTVVAGFDLVGHEDTGHSLHDYKEALMIPAKVGVKLPYFFHAGETDWQGTSIDRNILDALMLNASRIGHGFALSKHPAVRTYSWEKDIPIEVCPISNQVLKLVSDLRNHPVATLMATGHPMVISSDDPAMFGAKGLSYDFYEVFMGIGGMKADLRTLKQLAMNSIKYSTLLESEKNTFMEIWKKRWDKFIADVATK

SEQ ID NO: 289 - protein, 511 aa, Pongo abelii
  REGION 1..511: note = ADA2 (CECR1)
  SIGNAL 1..29
MLVDGPSEWPALRFLLLAVAMSFFGSALSIDETRAHLLLKEKMMRLGGRLVLNTKEEQANERLMMLKIAEMKEAMRTLIFPPSMHFFQAKHLIERSQVFNILRMMPKGAALHLHDIGIVTMDWLVRNVTYRPHCHICFTPKGIMQFRFAHPTPRTSEKCSKWILLEDYRKRVQNVTEFDDSLLRNFTLVTQHPEVIYTNQNVVWSKFETIFFTISGLIHYAPVFRDYVFQSMQEFYEDNVLYMEIRARLLPVYELSGEHHDEEWSVKTYQEVAQKFVETHPEFIGIKIIYSDHRSKDVAVIAESIRTAMGLRTKFPTVVAGFDLVGREDTGHSLQDYKEALMIPAKGGVKLPYFFHAGETDWQGTSIDRNILDALMLNTTRIGHGFALSKHPAVRAYSWKKDIPIEVCPISNQVLKLVSDLRNHPVATLMATGHPMVISSDDPAIFGAKGLSYDFYEVFMGIGGMKADLRTLKQLAMNSIKYSALLEIEKNTFMEIWKKRWDKFIADVATK

SEQ ID NO: 290 - protein, 504 aa, Nomascus leucogenys
  REGION 1..504: note = ADA2 (CECR1)
  SIGNAL 1..29
  UNSURE 230: note = Xaa = unknown
MLVDGPSEWPALRFLLLAVAMSFFGSALSIDETRAHLLLKEKMMRLGGRLVLSTKEEQANERLMTLKITEMKEAMKTLIFPPSMHFFQAKHLIERSQVFNILRMMPKGAALHLHDIGIVTMDWLVRNVTYRPHCHICFTPKGIMQFRFAHPTPRTSEKCSKWILLEDYRKRVQNVTEFDDSLLRNFTLVTQHPEVIYTNQNVVWSKFETIFFTISGLIHYAPVFRDYVFXDNVLYMEIRARLLPVYELSGEHHDEEWSVKTYQEVAQKFVETHPEFIGIKIIYSDHRSKDVAVIAESIRTAMGLRAKFPTVVAGFDLVGHEDTGHSLHDYKEALMIPTKDGVKLPYFFHAGETDWQGTSIDKNILDALMLNTTRIGHGFALSKHPAVRAYSWKKDIPIEVCPISNQVLKLVSDLRNHPVATLMATGHPMVISSDDPAIFGAKGLSYDFYEVFMGIGGMKADLRTLKQLAMNSIKYSTLLETEKNTFMEIWKKRWDKFIADVATK

SEQ ID NO: 291 - protein, 509 aa, Macaca fascicularis
  REGION 1..509: note = ADA2 (CECR1)
  SIGNAL 1..29
MLVDGPSEWPALRFLLLAVAMSFFRSALSIDEAHLLLKEKMMRLGGPLVLTTKEEQANERLMTLKIAEMKEAMKTLIFPPSMHFFQAKHLIERSQVFNILRMMPKGAALHLHDTGIVTMDWLVRNVTYRPHCHICFTSKGIMQFRFAHPTPRTSEKCSKWILLEDYRKRVQNVTEFDDSLLRNFTLVTQHPEVIYTNQNVVWSKFQTIFFTISGLIRYAPVFRDYVFRSMQEFYEDNVLYMEIRARLLPVYELSGEHHDEEWSVKTYQEVAQKFVETHPEFIGIKIIYSDDRSKDVTVIAESIRTAMGLRTKFPTVVAGFDLVGHEDTGHSLHYYKEALMIPARDGGKLPYFFHAGETDWQGTSIDKNILDALMLNTTRIGHGFALSKHPAARAYSWEKDIPIEVCPISNQVLKLVSDLRNHPVAALMAIGHPMVISSDDPAMFGAKGLSYDFYEAFMGIGGMKADLRTLKQLAMNSIRYSTLLETEKNTFMEIWKKRWDKFIADVATK

SEQ ID NO: 292 - protein, 509 aa, Chlorocebus sabaeus
  REGION 1..509: note = ADA2 (CECR1)
  SIGNAL 1..29
MSADGPSEWPSLRFLLLAVAMSFFRSALSIDEAHLLLKEKMMRLGGPLVLTTKEEQANERLMRLKIAEMKEAMKTLIFPPSMHFFQAKHLIERSQVFNILRMMPKGAALHLHDTGIVTMDWLVRNVTYRPHCHICFTSKGIMQFKFAHPTPRTSEKCSKWILLEDYRKRVQNVTEFDDSLLRNFTLVTQHPEVIYTNQNVVWSRFQTIFFTISGLIRYAPVFRDYVFRSMQEFYEDNVLYMEIRARLLPVYELSGEHHDEEWSVKTYQEVAQKFVETHPEFIGIKIIYSDDRFKDVTVIAESIRTAMGLRTKFPTVVAGFDLVGHEDTGHSLHDYKDALMIPARDGVKLPYFFHAGETDWQGTSIDKNILDALMLNTSRIGHGFALSKHPAARAYSWEKDIPIEVCPISNQVLKLVSDLRNHPVAALMAIGHPMVISSDDPAMFGAKGLSYDFYEAFMGIGGMKADLRTLKQLAMNSIRYSTLLETEKNTFMEIWKKRWDKFIADVATK

SEQ ID NO: 293 - protein, 509 aa, Macaca mulatta; identical to SEQ ID NO: 291
  REGION 1..509: note = ADA2 (CECR1)
  SIGNAL 1..29

SEQ ID NO: 294 - protein, 511 aa, Callithrix jacchus
  REGION 1..511: note = ADA2 (CECR1)
  SIGNAL 1..29
MLGNGPSGWSALCFLLLAAAVSFFGSALSMDETREHLLTKEKMMQLGGQLVLNIKEERANEKLMTLKVTEMKEAMKTLLFPPSMHFFRAKHLIDRSQVFNILRMMPKGAALHLHDIGIVTMDWLVRNVTYRPHCHICFTTKGIVQFRFAHPTPRTSEECPKWILLEDYRRRVQNVTDFDDSLLRNFTLVTQHPEVIYTDQNAVWSKFKTIFSTISGLIHYAPVFRDYVFQSMQEFYEDNVLYMEIRARLLPVYELSGEQHDLQWSVKGYQEVAEKFVETHPEFIGIKIIYSDHRSKDVTVIAGSIRTAMGLRTKFPTVVAGFDLVGREDTGHSLHYHNRALMIPAKDGVKLPYFFHAGETDWQGTSIDKNILDALMLNTTRIGHGFALNKHPALRAYSRKKDVPVEVCPISNQVLKLVSDLRNHPAATLMATGHPMVISSDDPAIFGAKGLSYDFYEVFMGIGGMKADLRTLKQLAINSIKYSSLLETEKNTFMAVWKKRWDKFIAHVATD

SEQ ID NO: 295 - protein, 510 aa, Xenopus laevis
  REGION 1..510: note = ADA2 (CECR1)
  SIGNAL 1..19
MACVSHWLLLLSLASATLSRPLWSERNGLIEMENSIRLGGNIILTPSEATANQKLMTVKGAEFKEAESTGLFPPSMHFFKARPLIQQSHVFSILRQMPKGGALHLHDFAILSVDWLVKNASYMADCYMCLTRDGGVRFLFAKPAPVGMLPPGCSEWILLETYRKKLGDVTEFDKGLIRNLTLLTDSPEPHIPSQDEIWRRFEGAFITASGLICYAPVFKEYFYESLRELYEDNIQYLEMRAMLPPVYELDGTVHDQFWSMAIYRDMANKFVGAHPDFLGAKIIYTVHRHEDLAQVTEAVHLAMKLMEAFPEIMAGFDLVGQEDAGHSLYQLSDALNIPSKLGVKLPYFFHAGETNWQGKDVDENVLDALLLNTTRIGHGYALLKHPVARNLSLELNVPLEICPISNQVLLLVSDLRNHPAAVLMAEGHPLVVSSDDPSIFGAQGISYDFYEMFMGIGGAKADLRTLKKLAENSIKYSALSKEGKEKLTEIWQKKWDKFIKDLAMNWKKEL

SEQ ID NO: 296 - protein, 553 aa, Drosophila melanogaster
  REGION 1..553: note = ADA2 (ADGF isoform A)
  SIGNAL 1..30
MSPVIRRNLIACLTLGLCVCLSFGPGPVESRTRPKNQVDRKLLTIYGSTPHVEALLGPGRPTPDTYKTLRSAFFRYEESRSLGHDLDLNSREIKANETIMKAKLKEFDEGLVTPHLFKPSQHIFDVLDGIRNTDLFKLLKKMPKGAVLHAHDTALCSTAAIINLTYYEHLWSCQQDGDLSASALRFSKDKPQALSDCDWSLLSDVRAKYGADKVDDYLAERLTLYPTKKFEDNNAAWSTFMSIFNLLDGLVMYAPVWADYYYKALEEFYEDGVLYLEFRSVVPTLYDMDGTEFTPMDTVRIYVETLEKFKEAHPDFIGSRMIYAPIRYTNAEGVTGYIQTLKQIKEKYPEFVAGFDLVGQEEMGRPLRDFVDELLSIPDDIDFYFHAGETNWFGSTVDENLIDAILLGTKRIGHGFGLVKHPVVLDMLKKLNVAIEVNPISNQVLQLVSDFRNHPCSHFFADGYPVVISSDDPSFWKATPLTHDFYIAFLGIASQHSDLRLLKKLALNSIQYSSLTGDAQFEALEKWQVKWDQFIADVNDRSSNRGSPSQRID

SEQ ID NO: 297 - protein, 520 aa, Drosophila melanogaster
  REGION 1..520: note = ADA2 (ADGF isoform B)
MTAIKHVAISCRRALTKCAKIGHTTVSVSRSLRKLSPTAFKTLRQAIAKVGHLNIMGQKIRLNDRELAANKVIMAVKKEEISKGILDPSQFTPGQHIFKTLAEVQKSPIFNLIKGMPKGGALHAHDTALCSTDYLISLTYRKNLWICTAEEGCKAIAFRFSKEEPKEKPVKESIWEPMEEFRERRGEENVTKYLTRRFSMYPFSKFISNNQAWAHFMGIFILLDGLLCHAPIWAEYYYNALKEFAEDGVQYLELRSLLPPLYCIDGDMLTIRDTVAIYNSELERFRADHPDFIGSKLIYAPLRGVEPSVVEQYVKTAVELNKEFPNFMVGFDLVGQEELGRPLIDFVEPLLKMPEHINFYFHAGETNWFGSPIDENLVDAILLGTKRIGHGYALTKHPMMMRLAKLLGIAIEVCPVSNQVLQLGVDYRNHPAALLLAANVPIVISSDDPSFWHCAPLSHDFYFAFLGIAPMKADLRFLKSLAINSIRYSALVGEEKRVGYRKWQEKWDKWIDDVVEHKYC

SEQ ID NO: 298 - protein, 506 aa, Drosophila melanogaster
  REGION 1..506: note = ADA2 (ADGF isoform C)
  SIGNAL 1..19
MRRLLMFVVLLTAQLQIQAQTALSYEQARQAVLTAEEELMTGGHTHLNTEEEKVDDIFMEYKLGELAQGFRNAEQNAAALHFFKAKPLIDRSAIFRFLQKMPKGSVLHVHNTASVSSKWVVDDLSYMPGLLRCTTATGQSILSFRRTPKEHKCQSQYVLVSDERRNSLDRQVYDRNFERLINLYTPVPELEYPTITRVWDRFQGMFDGLSDALIYLPAFRAYHWQMLEELYNDNVMYTEIRTSFKTLYDASGRTFPRERTIHELYALNQKFMKLHPDFLGFKVIMAVYRGYELDHLKDIVEVFKKLHQALPHFLVGFDLVGQEDKGKPLYSLLPVLRDLPPTARLFLHGGETNWFGASTDINLLDALLMNTTRIGHGYALAKHPILLNAVKSRRIAVELSPISNQVLHLVWDLRNHPGSQFFALDVPVVICNDDPGFWNAKGLSYDFYYAIMSLAPNNAGLRLLKTLVWNSVRYSTLTEEEQTRAFKILELSWSRFIDDVLEGSVF

SEQ ID NO: 299 - protein, 502 aa, Drosophila melanogaster
  REGION 1..502: note = ADA2 (ADGF isoform D)
  SIGNAL 1..22
MAMWFLGALVATVVLLTGSVQATDLPYETLREQIMEAERVASLGGNIWLSSDEEKANSILMNAKRAEIAEGLKTPEKYAPAMHFFQGRQYVRQSEVFRMIQKIPKGAFLHGHNTGMVTSRWIIQNLTTTNNLYTCRNVDGLLVFTYDQSGCHSEVQNVCTERINAEDRGKYERQLEKHINMHGPRPEALLPNRKKIWERFENIFTTVDRLYKYRPTYCAYHKRMLEELCEDNIIYAEIRASLSPLYDDNNRTLSTLEVANELERIVEEFKAKHHDFIGVKVIYAKRNRASEEEMLRRITTFKQLHHAKPNFVIGFDLIGQEDTGEPLNRYINQLSDLPSTANYFFHAGETNWNGRTDWNMMDAILLNTKRIGHAFALPKHPQLWSTIKKRNIAIEVNPISNQVLGFVWDLRNHPASFLIAENFPIVISSDDPGVWGAKGLSYDFYYAFMALAPADADLRFLKQLALNSIKYAVLTSDERRKINRVFQRKWQEFIANVLNPKF

SEQ ID NO: 300 - protein, 539 aa, Drosophila melanogaster
  REGION 1..539: note = ADA2 (ADGF isoform E)
MTVLLSHRMLLAGWARRATPTAAQWIHHNPEKMTLLEMLGTTNLRKSTPKDYRILREIFNSFERYSGVGNDIQLTLPERAANELIMCEKKREYEKGIMDPSKFAPGHHIFQVLTKVKKSPLFQILRRMPKGAALKAHDTSMCSSRVVIEITYRDNLWVCTTQNGCRVEEFRFAKDKPKDVSFENGEWQPMEKLRELRGEENLRKYLQMRFSMYPLASFTTNAHAWRHMMGIFGLLDGLLQYAPVWGDYYYNALKEFYADGVQYLEVRSVLPQLYSLDGSRMPKRETVQIYKDTLERFKKEHPGFIDSKLIYAPIRHVQPELVGEYIKECTELNKEFPSFVVGFDLVGQEDVGHPLSNFAAELLKLPDHIHFYFHAGQTNWYGSHVDQNLLDAIVLGTKRIGHGYTITKHPVLMRLAKYLNIALEVCPVSNQVLQLGSDYRSHPAATLIAENVPMVIASGSPGFWRAAPLSHDFYMAFLGIAPMNADLKFLKRTAKNSIKYSSLKDEAKAEAMEKWKKQWDKWVENIVRQRKKDSETEKK

SEQ ID NO: 301 - protein, 501 aa, Bombyx mori
  REGION 1..501: note = ADA2 (ADGF)
  SIGNAL 1..16
MFKIILFASFVVCIVADPPDINEYHRRRNTLSRNELRLTVGGNMTLSDKESEVNNCIMQLKFQEIDYAFDHPRYYNFSQHYFKYKDTMRKRRLYQILKVMPKGALLHVHDMSLLGPDYLMNITYMQDLYVCLYKETVGFRFSSKTPNAPCKGKWQDISKVRSSVENVTKFDEELRKHFTLVVDDPDTVYGCITDTWTKFMDYFLTVDPLLTYRPVWEKYFYDALMKFREDNVLYVEFRSVLPSLYELDGTAFDPVVTAKAYRKVIRKFVKDYPDFIGAKLIYAPSRRVNRSVLSTYLQIAKDVKNDMPDIFAGFDLVGQEDLGEPLIEFAPQLLEASESLDYFFHAGETDWLGTLTDENLMDAILLGAKRIGHAYALAKHPLLLEEVIKNDIGLEINIISNAVLSLVRDVRNHPLSTFLSKGLPVVISSDDPGAWEAEPLTDDFYVAFVGAASRLADLRLLKQLALNSFTYSSLEDRQKIEALRRFKRNWDSFINNFKCPL

SEQ ID NO: 302 - protein, 553 aa, Sarcophaga peregrina
  REGION 1..553: note = ADA2 (IDGF)
  SIGNAL 1..18
MPALKTLGTLCVLMLVFAHNEARRASLRANHMVQHAPHIEPQASVIGGRPTPEAYNSLRDIFFRYEESKTLGADITLTQKELQANQLIMEAKTREYEEGLATPHLFTPSQHLFEVLDDIKQSPLFKYISSMPKGAVLHAHDTALCSTDFLIRLTYRDNLWVCQGKGDKEVIGMRFSKTKPDVATQADCTWELLSKVRELHGADKVDTYLREHLTLYPTVKFLDNNEAWEQFGSIFALLDGLLFYAPSWADYYYNALKEFHADGVQYLEFRSTLPILYDLEGTSFTELDTVRIYKETLDKYMAEHIDFIGSKLIYAPIRNTDKEGLDNYIKVCVEIKEKYPDFVAGFDLVGQEEKGRPLKDFIPQLLGMPENIDFYFHAGETNWFGSTVDENLIDAVLLGTKRIGHGFALVKHPLVLQMLKERNIAIEVNPISNQVLQLVADYRNHPCAYFFADNYPVVISSDDPSFWKATPLSHDFYIAFLGIASAHSDMRLLKKLALNSINYSSLSPEQKRVALAKWQIKWDDFIDEVLSGNYDNNGSNNAAQHRLNTNKII

SEQ ID NO: 303 - protein, 32 aa, synthetic construct
  REGION 1..32: note = C-terminal peptide (CTP) of the beta Subunit ofHuman Chorionic Gonadotropin
DPRFQDSSSSKAPPPSLPSPSRLPGPSDTPIL

SEQ ID NO: 304 - protein, 28 aa, synthetic construct
  REGION 1..28: note = C-terminal peptide (CTP) of the beta Subunit ofHuman Chorionic Gonadotropin
SSSSKAPPPSLPSPSRLPGPSDTPILPQ

SEQ ID NO: 305 - protein, 609 aa, Homo sapiens [sequence omitted]

SEQ ID NO: 306 - skipped

SEQ ID NO: 307 - protein, 11 aa, synthetic construct
  REGION 1..11: note = albumin-binding peptide
DICLPRWGCLW

SEQ ID NO: 308 - protein, 18 aa, synthetic construct
  REGION 1..18: note = albumin-binding peptide
RLIEDICLPRWGCLWEDD

SEQ ID NO: 309 - protein, 20 aa, synthetic construct
  REGION 1..20: note = albumin-binding peptide
QRLMEDICLPRWGCLWEDDF

SEQ ID NO: 310 - protein, 21 aa, synthetic construct
  REGION 1..21: note = albumin-binding peptide
QGLIGDICLPRWGCLWGDSVK

SEQ ID NO: 311 - protein, 20 aa, synthetic construct
  REGION 1..20: note = albumin-binding peptide
GEWWEDICLPRWGCLWEEED

SEQ ID NO: 312 - protein, 20 aa, synthetic construct
  REGION 1..20: note = PAS sequence
ASPAAPAPASPAAPAPSAPA

SEQ ID NO: 313 - protein, 20 aa, synthetic construct
  REGION 1..20: note = PAS sequence
AAPASPAPAAPSAPAPAAPS

SEQ ID NO: 314 - protein, 20 aa, synthetic construct
  REGION 1..20: note = PAS sequence
APSSPSPSAPSSPSPASPSS

SEQ ID NO: 315 - protein, 19 aa, synthetic construct
  REGION 1..19: note = PAS sequence
APSSPSPSAPSSPSPASPS

SEQ ID NO: 316 - protein, 20 aa, synthetic construct
  REGION 1..20: note = PAS sequence
SSPSAPSPSSPASPSPSSPA

SEQ ID NO: 317 - protein, 24 aa, synthetic construct
  REGION 1..24: note = PAS sequence
AASPAAPSAPPAAASPAAPSAPPA

SEQ ID NO: 318 - protein, 20 aa, synthetic construct
  REGION 1..20: note = PAS sequence
ASAAAPAAASAAASAPSAAA

SEQ ID NO: 319 - DNA, 2808 bp, Homo sapiens
  misc_feature 1..2808: note = transferrin (TF)
  source 1..2808: mol_type = genomic DNA
tggcaccgagcgagccgcgatgacaatggctgcattgtgcttcatgtcccttcccatcaacatttctgtgctggactccttccactcgcgggtcgtctccagagctcagaaaatgaggtgatcagtgggacgagtaaggaaggggggttgggagaggggcgattgggcaacccggctgcacaaacacgggaggtcaaagattgcgcccagcccgcccaggccgggaatggaataaagggacgcggggcgccggaggctgcacagaagcgagtccgactgtgctcgctgctcagcgccgcacccggaagatgaggctcgccgtgggagccctgctggtctgcgccgtcctggggctgtgtctggctgtccctgataaaactgtgagatggtgtgcagtgtcggagcatgaggccactaagtgccagagtttccgcgaccatatgaaaagcgtcattccatccgatggtcccagtgttgcttgtgtgaagaaagcctcctaccttgattgcatcagggccattgcggcaaacgaagcggatgctgtgacactggatgcaggtttggtgtatgatgcttacctggctcccaataacctgaagcctgtggtggcagagttctatgggtcaaaagaggatccacagactttctattatgctgttgctgtggtgaagaaggatagtggcttccagatgaaccagcttcgaggcaagaagtcctgccacacgggtctaggcaggtccgctgggtggaacatccccataggcttactttactgtgacttacctgagccacgtaaacctcttgagaaagcagtggccaatttcttctcgggcagctgtgccccttgtgcggatgggacggacttcccccagctgtgtcaactgtgtccagggtgtggctgctccacccttaaccaatacttcggctactcgggagccttcaagtgtctgaaggatggtgctggggatgtggcctttgtcaagcactcgactatatttgagaacttggcaaacaaggctgacagggaccagtatgagctgctttgcctggacaacacccggaagccggtagatgaatacaaggactgccacttggcccaggtcccttctcataccgtcgtggcccgaagtatgggcggcaaggaggacttgatctgggagcttctcaaccaggcccaggaacattttggcaaagacaaatcaaaagaattccaactattcagctctcctcatgggaaggacctgctgtttaaggactctgcccacgggtttttaaaagtcccccccaggatggatgccaagatgtacctgggctatgagtatgtcactgccatccggaatctacgggaaggcacatgcccagaagccccaacagatgaatgcaagcctgtgaagtggtgtgcgctgagccaccacgagaggctcaagtgtgatgagtggagtgttaacagtgtagggaaaatagagtgtgtatcagcagagaccaccgaagactgcatcgccaagatcatgaatggagaagctgatgccatgagcttggatggagggtttgtctacatagcgggcaagtgtggtctggtgcctgtcttggcagaaaactacaataagagcgataattgtgaggatacaccagaggcagggtattttgctgtagcagtggtgaagaaatcagcttctgacctcacctgggacaatctgaaaggcaagaagtcctgccatacggcagttggcagaaccgctggctggaacatccccatgggcctgctctacaataagatcaaccactgcagatttgatgaatttttcagtgaaggttgtgcccctgggtctaagaaagactccagtctctgtaagctgtgtatgggctcaggcctaaacctgtgtgaacccaacaacaaagagggatactacggctacacaggcgctttcaggtgtctggttgagaagggagatgtggcctttgtgaaacaccagactgtcccacagaacactgggggaaaaaaccctgatccatgggctaagaatctgaatgaaaaagactatgagttgctgtgccttgatggtaccaggaaacctgtggaggagtatgcgaactgccacctggccagagccccgaatcacgctgtggtcacacggaaagataaggaagcttgcgtccacaagatattacgtcaacagcagcacctatttggaagcaacgtaactgactgctcgggcaacttttgtttgttccggtcggaaaccaaggaccttctgttcagagatgacacagtatgtttggccaaacttcatgacagaaacacatatgaaaaatacttaggagaagaatatgtcaaggctgttggtaacctgagaaaatgctccacctcatcactcctggaagcctgcactttccgtagaccttaaaatctcagaggtagggctgccaccaaggtgaagatgggaacgcagatgatccatgagtttgccctggtttcactggcccaagtggtttgtgctaaccacgtctgtcttcacagctctgtgttgccatgtgtgctgaacaaaaaataaaaattattattgattttatatttcaaaaactccattctttcctaaatattttcaacaaaggatttctttatgcattctgcctaaatacctatgcaactgagcccttccttctcagctcaagattcgtctggtctttccctacagctttgtgtgtgccatggccacatctcctgggtacagttcaaggagacatcttttctaaaagggtctgcgtgatcattaaaatataatcaaatgtaaaaaaaaaaaaaaaaaa

SEQ ID NO: 320 - protein, 698 aa, Homo sapiens
  REGION 1..698: note = serotransferrin precursor
  SIGNAL 1..19
MRLAVGALLVCAVLGLCLAVPDKTVRWCAVSEHEATKCQSFRDHMKSVIPSDGPSVACVKKASYLDCIRAIAANEADAVTLDAGLVYDAYLAPNNLKPVVAEFYGSKEDPQTFYYAVAVVKKDSGFQMNQLRGKKSCHTGLGRSAGWNIPIGLLYCDLPEPRKPLEKAVANFFSGSCAPCADGTDFPQLCQLCPGCGCSTLNQYFGYSGAFKCLKDGAGDVAFVKHSTIFENLANKADRDQYELLCLDNTRKPVDEYKDCHLAQVPSHTVVARSMGGKEDLIWELLNQAQEHFGKDKSKEFQLFSSPHGKDLLFKDSAHGFLKVPPRMDAKMYLGYEYVTAIRNLREGTCPEAPTDECKPVKWCALSHHERLKCDEWSVNSVGKIECVSAETTEDCIAKIMNGEADAMSLDGGFVYIAGKCGLVPVLAENYNKSDNCEDTPEAGYFAVAVVKKSASDLTWDNLKGKKSCHTAVGRTAGWNIPMGLLYNKINHCRFDEFFSEGCAPGSKKDSSLCKLCMGSGLNLCEPNNKEGYYGYTGAFRCLVEKGDVAFVKHQTVPQNTGGKNPDPWAKNLNEKDYELLCLDGTRKPVEEYANCHLARAPNHAVVTRKDKEACVHKILRQQQHLFGSNVTDCSGNFCLFRSETKDLLFRDDTVCLAKLHDRNTYEKYLGEEYVKAVGNLRKCSTSSLLEACTFRRP

SEQ ID NO: 321 - DNA, 2298 bp, Homo sapiens
  misc_feature 1..2298: note = transferrin (TF)
  source 1..2298: mol_type = genomic DNA
tgtgctcgctgctcagcgcgcacccggaagatgaggctcgccgtgggagccctgctggtctgcgccgtcctggggctgtgtctggctgtccctgataaaactgtgagatggtgtgcagtgtcggagcatgaggccactaagtgccagagtttccgcgaccatatgaaaagcgtcattccatccgatggtcccagtgttgcttgtgtgaagaaagcctcctaccttgattgcatcagggccattgcggcaaacgaagcggatgctgtgacactggatgcaggtttggtgtatgatgcttacttggctcccaataacctgaagcctgtggtggcagagttctatgggtcaaaagaggatccacagactttctattatgctgttgctgtggtgaagaaggatagtggcttccagatgaaccagcttcgaggcaagaagtcctgccacacgggtctaggcaggtccgctgggtggaacatccccataggcttactttactgtgacttacctgagccacgtaaacctcttgagaaagcagtggccaatttcttctcgggcagctgtgccccttgtgcggatgggacggacttcccccagctgtgtcaactgtgtccagggtgtggctgctccacccttaaccaatacttcggctactcgggagccttcaagtgtctgaaggatggtgctggggatgtggcctttgtcaagcactcgactatatttgagaacttggcaaacaaggctgacagggaccagtatgagctgctttgcctagacaacacccggaagccggtagatgaatacaaggactgccacttggcccaggtcccttctcataccgtcgtggcccgaagtatgggcggcaaggaggacttgatctgggagcttctcaaccaggcccaggaacattttggcaaagacaaatcaaaagaattccaactattcagctctcctcatgggaaggacctgctgtttaaggactctgcccacgggtttttaaaagtccccccaaggatggatgccaagatgtacctgggctatgagtatgtcactgccatccggaatctacgggaaggcacatgcccagaagccccaacagatgaatgcaagcctgtgaagtggtgtgcgctgagccaccacgagaggctcaagtgtgatgagtggagtgttaacagtgtagggaaaatagagtgtgtatcagcagagaccaccgaagactgcatcgccaagatcatgaatggagaagctgatgccatgagcttggatggagggtttgtctacatagcgggcaagtgtggtctggtgcctgtcttggcagaaaactacaataagagcgataattgtgaggatacaccagaggcagggtattttgctgtagcagtggtgaagaaatcagcttctgacctcacctgggacaatctgaaaggcaagaagtcctgccatacggcagttggcagaaccgctggctggaacatccccatgggcctgctctacaataagatcaaccactgcagatttgatgaatttttcagtgaaggttgtgcccctgggtctaagaaagactccagtctctgtaagctgtgtatgggctcaggcctaaacctgtgtgaacccaacaacaaagagggatactacggctacacaggcgctttcaggtgtctggttgagaagggagatgtggcctttgtgaaacaccagactgtcccacagaacactgggggaaaaaaccctgatccatgggctaagaatctgaatgaaaaagactatgagttgctgtgccttgatggtaccaggaaacctgtggaggagtatgcgaactgccacctggccagagccccgaatcacgctgtggtcacacggaaagataaggaagcttgcgtccacaagatattacgtcaacagcagcacctatttggaagcaacgtaactgactgctcgggcaacttttgtttgttccggtcggaaaccaaggaccttctgttcagagatgacacagtatgtttggccaaacttcatgacagaaacacatatgaaaaatacttaggagaagaatatgtcaaggctgttggtaacctgagaaaatgctccacctcatcactcctggaagcctgcactttccgtagaccttaaaatctcagaggtagggctgccaccaaggtgaagatgggaacgcagatgatccatgagtttgccctggtttcactggcccaagtggtttgtgctaaccacgtctgtcttcacagctctgtgttgccatgtgtgctgaacaaaaaataaaaattattattgattttatatttc

SEQ ID NO: 322 - DNA, 2299 bp, Homo sapiens
  misc_feature 1..2299: note = transferrin (TF)
  source 1..2299: mol_type = genomic DNA
tgtgctcgctgctcagcgccgcacccggaagatgaggctcgccgtgggagccctgctggtctgcgccgtcctggggctgtgtctggctgtccctgataaaactgtgagatggtgtgcagtgtcggagcatgaggccactaagtgccagagtttccgcgaccatatgaaaagcgtcattccatccgatggtcccagtgttgcttgtgtgaagaaagcctcctaccttgattgcatcagggccattgcggcaaacgaagcggatgctgtgacactggatgcaggtttggtgtatgatgcttacctggctcccaataacctgaagcctgtggtggcagagttctatgggtcaaaagaggatccacagactttctattatgctgttgctgtggtgaagaaggatagtggcttccagatgaaccagcttcgaggcaagaagtcctgccacacgggtctaggcaggtccgctgggtggaacatccccataggcttactttactgtgacttacctgagccacgtaaacctcttgagaaagcagtggccaatttcttctcgggcagctgtgccccttgtgcggatgggacggacttcccccagctgtgtcaactgtgtccagggtgtggctgctccacccttaaccaatacttcggctactcgggagccttcaagtgtctgaaggatggtgctggggatgtggcctttgtcaagcactcgactatatttgagaacttggcaaacaaggctgacagggaccagtatgagctgctttgcctggacaacacccggaagccggtagatgaatacaaggactgccacttggcccaggtcccttctcataccgtcgtggcccgaagtatgggcggcaaggaggacttgatctgggagcttctcaaccaggcccaggaacattttggcaaagacaaatcaaaagaattccaactattcagctctcctcatgggaaggacctgctgtttaaggactctgcccacgggtttttaaaagtcccccccaggatggatgccaagatgtacctgggctatgagtatgtcactgccatccggaatctacgggaaggcacatgcccagaagccccaacagatgaatgcaagcctgtgaagtggtgtgcgctgagccaccacgagaggctcaagtgtgatgagtggagtgttaacagtgtagggaaaatagagtgtgtatcagcagagaccaccgaagactgcatcgccaagatcatgaatggagaagctgatgccatgagcttggatggagggtttgtctacatagcgggcaagtgtggtctggtgcctgtcttggcagaaaactacaataagagcgataattgtgaggatacaccagaggcagggtattttgctgtagcagtggtgaagaaatcagcttctgacctcacctgggacaatctgaaaggcaagaagtcctgccatacggcagttggcagaaccgctggctggaacatccccatgggcctgctctacaataagatcaaccactgcagatttgatgaatttttcagtgaaggttgtgcccctgggtctaagaaagactccagtctctgtaagctgtgtatgggctcaggcctaaacctctgtgaacccaacaacaaagagggatactacggctacacaggcgctttcaggtgtctggttgagaagggagatgtggcctttgtgaaacaccagactgtcccacagaacactgggggaaaaaaccctgatccatgggctaagaatctgaatgaaaaagactatgagttgctgtgccttgatggtaccaggaaacctgtggaggagtatgcgaactgccacctggccagagccccgaatcacgctgtggtcacacggaaagataaggaagcttgcgtccacaagatattacgtcaacagcagcacctatttggaagcaacgtaactgactgctcgggcaacttttgtttgttccggtcggaaaccaaggaccttctgttcagagatgacacagtatgtttggccaaacttcatgacagaaacacatatgaaaaatacttaggagaagaatatgtcaaggctgttggtaacctgagaaaatgctccacctcatcactcctggaagcctgcactttccgtagaccttaaaatctcagaggtagggctgccaccaaggtgaagatgggaacgcagatgatccatgagtttgccctggtttcactggcccaagtggtttgtgctaaccacgtctgtcttcacagctctgtgttgccatgtgtgctgaacaaaaaataaaaattattattgattttatatttc

SEQ ID NO: 323 - DNA, 2347 bp, Homo sapiens
  misc_feature 1..2347: note = transferrin (TF)
  unsure 44: note = n = unknown
  source 1..2347: mol_type = genomic DNA
acggcgagcctcatcctccgggtgcggcgctgagcagcgagtcncgactgtgctcgctgctcagcgccgcacccggaggatgaggctcgccgtgggagccctgctggtctgcgccgtcctggggctgtgtctggctgtccctgataaaactgtgagatggtgtgcagtgtcggagcatgaggccactaagtgccagagtttccgcgaccatatgaaaagcgtcattccatccgatggtcccagtgttgcttgtgtgaagaaagcctcctaccttgattgcatcagggccattgcggcaaacgaagcggatgctgtgacactggatgcaggtttggtgtatgatgcttacctggctcccaataacctgaagcctgtggtggcagagttctatgggtcaaaagaggatccacagactttctattatgctgttgctgtggtgaagaaggatagtggcttccagatgaaccagcttcgaggcaagaagtcctgccacacgggtctaggcaggtccgctgggtggaacatccccataggcttactttactgtgacttacctgagccacgtaaacctcttgagaaagcagtggccaatttcttctcgggcagctgtgccccttgtgcggatgggacggacttcccccagctgtgtcaactgtgtccagggtgtggctgctccacccttaaccaatacttcggctactcaggagccttcaagtgtctgaaggatggtgctggggatgtggcctttgtcaagcactcgactatatttgagaacttggcaaacaaggctgacagggaccagtatgagctgctttgcctggacaacacccggaagccggtagatgaatacaaggactgccacttggcccaggtcccttctcataccgtcgtggcccgaagtatgggcggcaaggaggacttgatctgggagcttctcaaccaggcccaggaacattttggcaaagacaaatcaaaagaattccaactattcagctctcctcatgggaaggacctgctgtttaaggactctgcccacgggtttttaaaagtcccccccaggatggatgccaagatgtacctgggctatgagtatgtcactgccatccggaatctacgggaaggcacatgcccagaagccccaacagatgaatgcaagcctgtgaagtggtgtgcgctgagccaccacgagaggctcaagtgtgatgagtggagtgttaacagtgtagggaaaatagagtgtgtatcagcagagaccaccgaagactgcatcgccaagatcatgaatggagaagctgatgccatgagcttggatggagggtttgtctacatagcgggcaagtgtggtctggtgcctgtcttggcagaaaactacaataagagcgataattgtgaggatacaccagaggcagggtattttgctgtagcagtggtgaagaaatcagcttctgacctcacctgggacaatctgaaaggcaagaagtcctgccatacggcagttggcagaaccgctggctggaacatccccatgggcctgctctacaataagatcaaccactgcagatttgatgaatttttcagtgaaggttgtgcccctgggtctaagaaagactccagtctctgtaagctgtgtatgggctcaggcctaaacctgtgtgaacccaacaacaaagagggatactacggctacacaggcgctttcaggtgtctggttgagaagggagatgtggcctttgtgaaacaccagactgtcccacagaacactgggggaaaaaaccctgatccatgggctaagaatctgaatgaaaaagactatgagttgctgtgccttgatggtaccaggaaacctgtggaggagtatgcgaactgccacctggccagagccccgaatcacgctgtggtcacacggaaagataaggaagcttgcgtccacaagatattacgtcaacagcagcacctatttggaagcaacgtaactgactgctcgggcaacttttgtttgttccggtcggaaaccaaggaccttctgttcagagatgacacagtatgtttggccaaacttcatgacagaaacacatatgaaaaatacttaggagaagaatatgtcaaggctgttggtaacctgagaaaatgctccacctcatcactcctggaagcctgcactttccgtagaccttaaaatctcagaggtagggctgccaccaaggtgaagatgggaacgcagatgatccatgagtttgccctggtttcactggcccaagtggtttgtgctaaccacgtctgtcttcacagctctgtgttgccatgtgtgctgaacaaaaaataaaaattattattgattttaaaaaaa

SEQ ID NO: 324 - protein, 698 aa, Homo sapiens; identical to SEQ ID NO: 320
  REGION 1..698: note = transferrin (TF)

SEQ ID NO: 325 - protein, 698 aa, Homo sapiens; identical to SEQ ID NO: 320
  REGION 1..698: note = transferrin
  SIGNAL 1..19

SEQ ID NO: 326 - protein, 482 aa, Pan troglodytes
  REGION 1..482: note = ADA2 (CECR1) mature form
IDETRAHLLLKEKMMRLGGRLVLNTKEELANERLMTLKIAEMKEAMRTLIFPPSMHFFQAKHLIERSQVFNILRMMPKGAALHLHDIGIVTMDWLVRNVTYRPHCHICFTPRGIMQFRFAHPTPRTSEKCSKWILLEDYRKRVQNVTEFDDSLLRNFTLVTQHPEVIYTNQNVVWSKFETIFFTISGLIHYAPVFRDYVFRSMQEFYEDNVLYMEIRARLLPVYELSGEHHDEEWSVKTYQEVAQKFVETHPEFIGIKIIYSDHRSKDVAVIAESIRTAMGLRTKFPTVVAGFDLVGHEDTGHSLHDYKEALMIPAKVGVKLPYFFHAGETDWQGTSIDRNILDALMLNTSRIGHGFALSKHPAVRTYSWKKDIPIEVCPISNQVLKLVSDLRNHPVATLMATGHPMVISSDDPAMFGAKGLSYDFYEVFMGIGGMKADLRTLKQLAMNSIKYSTLLESEKNTFMEIWKKRWDKFIADVATK

SEQ ID NO: 327 - protein, 482 aa, Gorilla gorilla
  REGION 1..482: note = ADA2 (CECR1) mature form
IDETRAHLLLKEKMMRLGGRLVLNTKEELANERLMTLKIAEMKEAMRTLIFPPSMHFFQAKHLIERSQVFNVLRMMPKGAALHLHDIGIVTMDWLVRNVTYRPHCHICFTPRGIMQFRFAHPTPRTSEKCSKWILLEDYRKQVQNVTEFDDSLLRNFTLVTQHPEVIYTNQNVVWSKFENIFFTISGLIHYAPVFRDYVFRSMQEFYEDNVLYMEIRARLLPVYELSGEHHDEEWSVKTYQEVAQKFVETHPEFIGIKIIYSDHRSKDVAVIAESIRTAMGLRTKFPTVVAGFDLVGHEDTGHSLHDYKEALMIPAKDGVKLPYFFHAGETDWQGTSIDRNILDALMLNTTRIGHGFALSKHPAVRTYSWKKDIPIEVCPISNQVLKLVSDLRNHPVATLMATGHPMVISSDDPAMFGAKGLSYDFYEVFMGIGGMKADLRTLKQLAMNSIKYSTLLESEKNTFMEIWKKRWDKFIADVATK

SEQ ID NO: 328 - protein, 482 aa, Pan paniscus
  REGION 1..482: note = ADA2 (CECR1) mature form
IDETRAHLLLKEKMMRLGGRLVLNTKEELANERLMTLKIAEMKEAMRTLIFPPSMHFFQAKHLIERSQVFNILRMMPKGAALHLHDIGIVTMDWLVRNVTYRPHCHICFTPRGIMQFRFAHPTPRTSEKCSKWILLEDYRKRVQNVTEFDDSLLRNFTLVTQHPEVIYTNQNVVWSKFETIFFTISGLIHYAPVFRDYVFRSMQEFYEDNVLYMEIRARLLPVYELSGEHHDEEWSVKTYQEVAQKFVETHPEFIGIKIIYSDHRSKDVAVIAESIRTAMGLRTKFPTVVAGFDLVGHEDTGHSLHDYKEALMIPAKVGVKLPYFFHAGETDWQGTSIDRNILDALMLNASRIGHGFALSKHPAVRTYSWEKDIPIEVCPISNQVLKLVSDLRNHPVATLMATGHPMVISSDDPAMFGAKGLSYDFYEVFMGIGGMKADLRTLKQLAMNSIKYSTLLESEKNTFMEIWKKRWDKFIADVATK

SEQ ID NO: 329 - protein, 482 aa, Pongo abelii
  REGION 1..482: note = ADA2 (CECR1) mature form
IDETRAHLLLKEKMMRLGGRLVLNTKEEQANERLMMLKIAEMKEAMRTLIFPPSMHFFQAKHLIERSQVFNILRMMPKGAALHLHDIGIVTMDWLVRNVTYRPHCHICFTPKGIMQFRFAHPTPRTSEKCSKWILLEDYRKRVQNVTEFDDSLLRNFTLVTQHPEVIYTNQNVVWSKFETIFFTISGLIHYAPVFRDYVFQSMQEFYEDNVLYMEIRARLLPVYELSGEHHDEEWSVKTYQEVAQKFVETHPEFIGIKIIYSDHRSKDVAVIAESIRTAMGLRTKFPTVVAGFDLVGREDTGHSLQDYKEALMIPAKGGVKLPYFFHAGETDWQGTSIDRNILDALMLNTTRIGHGFALSKHPAVRAYSWKKDIPIEVCPISNQVLKLVSDLRNHPVATLMATGHPMVISSDDPAIFGAKGLSYDFYEVFMGIGGMKADLRTLKQLAMNSIKYSALLEIEKNTFMEIWKKRWDKFIADVATK

SEQ ID NO: 330 - protein, 475 aa, Nomascus leucogenys
  REGION 1..475: note = ADA2 (CECR1) mature form
  UNSURE 201: note = Xaa = unknown
IDETRAHLLLKEKMMRLGGRLVLSTKEEQANERLMTLKITEMKEAMKTLIFPPSMHFFQAKHLIERSQVFNILRMMPKGAALHLHDIGIVTMDWLVRNVTYRPHCHICFTPKGIMQFRFAHPTPRTSEKCSKWILLEDYRKRVQNVTEFDDSLLRNFTLVTQHPEVIYTNQNVVWSKFETIFFTISGLIHYAPVFRDYVFXDNVLYMEIRARLLPVYELSGEHHDEEWSVKTYQEVAQKFVETHPEFIGIKIIYSDHRSKDVAVIAESIRTAMGLRAKFPTVVAGFDLVGHEDTGHSLHDYKEALMIPTKDGVKLPYFFHAGETDWQGTSIDKNILDALMLNTTRIGHGFALSKHPAVRAYSWKKDIPIEVCPISNQVLKLVSDLRNHPVATLMATGHPMVISSDDPAIFGAKGLSYDFYEVFMGIGGMKADLRTLKQLAMNSIKYSTLLETEKNTFMEIWKKRWDKFIADVATK

SEQ ID NO: 331 - protein, 480 aa, Macaca fascicularis
  REGION 1..480: note = ADA2 (CECR1) mature form
IDEAHLLLKEKMMRLGGPLVLTTKEEQANERLMTLKIAEMKEAMKTLIFPPSMHFFQAKHLIERSQVFNILRMMPKGAALHLHDTGIVTMDWLVRNVTYRPHCHICFTSKGIMQFRFAHPTPRTSEKCSKWILLEDYRKRVQNVTEFDDSLLRNFTLVTQHPEVIYTNQNVVWSKFQTIFFTISGLIRYAPVFRDYVFRSMQEFYEDNVLYMEIRARLLPVYELSGEHHDEEWSVKTYQEVAQKFVETHPEFIGIKIIYSDDRSKDVTVIAESIRTAMGLRTKFPTVVAGFDLVGHEDTGHSLHYYKEALMIPARDGGKLPYFFHAGETDWQGTSIDKNILDALMLNTTRIGHGFALSKHPAARAYSWEKDIPIEVCPISNQVLKLVSDLRNHPVAALMAIGHPMVISSDDPAMFGAKGLSYDFYEAFMGIGGMKADLRTLKQLAMNSIRYSTLLETEKNTFMEIWKKRWDKFIADVATK

SEQ ID NO: 332 - protein, 480 aa, Chlorocebus sabaeus
  REGION 1..480: note = ADA2 (CECR1) mature form
IDEAHLLLKEKMMRLGGPLVLTTKEEQANERLMRLKIAEMKEAMKTLIFPPSMHFFQAKHLIERSQVFNILRMMPKGAALHLHDTGIVTMDWLVRNVTYRPHCHICFTSKGIMQFKFAHPTPRTSEKCSKWILLEDYRKRVQNVTEFDDSLLRNFTLVTQHPEVIYTNQNVVWSRFQTIFFTISGLIRYAPVFRDYVFRSMQEFYEDNVLYMEIRARLLPVYELSGEHHDEEWSVKTYQEVAQKFVETHPEFIGIKIIYSDDRFKDVTVIAESIRTAMGLRTKFPTVVAGFDLVGHEDTGHSLHDYKDALMIPARDGVKLPYFFHAGETDWQGTSIDKNILDALMLNTSRIGHGFALSKHPAARAYSWEKDIPIEVCPISNQVLKLVSDLRNHPVAALMAIGHPMVISSDDPAMFGAKGLSYDFYEAFMGIGGMKADLRTLKQLAMNSIRYSTLLETEKNTFMEIWKKRWDKFIADVATK

SEQ ID NO: 333 - protein, 480 aa, Macaca mulatta; identical to SEQ ID NO: 331
  REGION 1..480: note = ADA2 (CECR1) mature form

SEQ ID NO: 334 - protein, 484 aa, Callithrix jacchus
  REGION 1..484: note = ADA2 (CECR1) mature form
LSMDETREHLLTKEKMMQLGGQLVLNIKEERANEKLMTLKVTEMKEAMKTLLFPPSMHFFRAKHLIDRSQVFNILRMMPKGAALHLHDIGIVTMDWLVRNVTYRPHCHICFTTKGIVQFRFAHPTPRTSEECPKWILLEDYRRRVQNVTDFDDSLLRNFTLVTQHPEVIYTDQNAVWSKFKTIFSTISGLIHYAPVFRDYVFQSMQEFYEDNVLYMEIRARLLPVYELSGEQHDLQWSVKGYQEVAEKFVETHPEFIGIKIIYSDHRSKDVTVIAGSIRTAMGLRTKFPTVVAGFDLVGREDTGHSLHYHNRALMIPAKDGVKLPYFFHAGETDWQGTSIDKNILDALMLNTTRIGHGFALNKHPALRAYSRKKDVPVEVCPISNQVLKLVSDLRNHPAATLMATGHPMVISSDDPAIFGAKGLSYDFYEVFMGIGGMKADLRTLKQLAINSIKYSSLLETEKNTFMAVWKKRWDKFIAHVATD

SEQ ID NO: 335 - protein, 491 aa, Xenopus laevis
  REGION 1..491: note = ADA2 (CECR1) mature form
RPLWSERNGLIEMENSIRLGGNIILTPSEATANQKLMTVKGAEFKEAESTGLFPPSMHFFKARPLIQQSHVFSILRQMPKGGALHLHDFAILSVDWLVKNASYMADCYMCLTRDGGVRFLFAKPAPVGMLPPGCSEWILLETYRKKLGDVTEFDKGLIRNLTLLTDSPEPHIPSQDEIWRRFEGAFITASGLICYAPVFKEYFYESLRELYEDNIQYLEMRAMLPPVYELDGTVHDQFWSMAIYRDMANKFVGAHPDFLGAKIIYTVHRHEDLAQVTEAVHLAMKLMEAFPEIMAGFDLVGQEDAGHSLYQLSDALNIPSKLGVKLPYFFHAGETNWQGKDVDENVLDALLLNTTRIGHGYALLKHPVARNLSLELNVPLEICPISNQVLLLVSDLRNHPAAVLMAEGHPLVVSSDDPSIFGAQGISYDFYEMFMGIGGAKADLRTLKKLAENSIKYSALSKEGKEKLTEIWQKKWDKFIKDLAMNWKKEL

SEQ ID NO: 336 - protein, 523 aa, Drosophila melanogaster
  REGION 1..523: note = ADA2 (ADGF isoform A) mature form
RTRPKNQVDRKLLTIYGSTPHVEALLGPGRPTPDTYKTLRSAFFRYEESRSLGHDLDLNSREIKANETIMKAKLKEFDEGLVTPHLFKPSQHIFDVLDGIRNTDLFKLLKKMPKGAVLHAHDTALCSTAAIINLTYYEHLWSCQQDGDLSASALRFSKDKPQALSDCDWSLLSDVRAKYGADKVDDYLAERLTLYPTKKFEDNNAAWSTFMSIFNLLDGLVMYAPVWADYYYKALEEFYEDGVLYLEFRSVVPTLYDMDGTEFTPMDTVRIYVETLEKFKEAHPDFIGSRMIYAPIRYTNAEGVTGYIQTLKQIKEKYPEFVAGFDLVGQEEMGRPLRDFVDELLSIPDDIDFYFHAGETNWFGSTVDENLIDAILLGTKRIGHGFGLVKHPVVLDMLKKLNVAIEVNPISNQVLQLVSDFRNHPCSHFFADGYPVVISSDDPSFWKATPLTHDFYIAFLGIASQHSDLRLLKKLALNSIQYSSLTGDAQFEALEKWQVKWDQFIADVNDRSSNRGSPSQRID

SEQ ID NO: 337 - protein, 544 aa, Macaca mulatta
  REGION 1..544: note = ADA2 (CECR1)
MLVDGPSEWPALRFLLLAVAMSFFRSALSIDEAHLLLKEKMMRLGGPLVLTTKEEQANERLMTLKIAEMKEAMKTLIFPPSMHFFQAKHLIERSQVFNILRMMPKGAALHLHDTGIVTMDWLVRNVTYRPHCHICFTSKGIMQFRFAHPTPRTSEKCSKWILLEDYRKRVQNVTEFDDSLLRNFTLVTQHPEVIYTNQNVVWSKFQTIFFTISGLIRYAPVFRDYVFRSMQEFYEDNVLYMEIRARLLPLSPLCSHCVPLLSLVALAALQLLHLELGKQCGGEQVYELSGEHHDEEWSVKTYQEVAQKFVETHPEFIGIKIIYSDDRSKDVTVIAESIRTAMGLRTKFPTVVAGFDLVGHEDTGHSLHYYKEALMIPARDGGKLPYFFHAGETDWQGTSIDKNILDALMLNTTRIGHGFALSKHPAARAYSWEKDIPIEVCPISNQVLKLVSDLRNHPVAALMAIGHPMVISSDDPAMFGAKGLSYDFYEAFMGIGGMKADLRTLKQLAMNSIRYSTLLETEKNTFMEIWKKRWDKFIADVATK

SEQ ID NO: 338 - protein, 487 aa, Drosophila melanogaster
  REGION 1..487: note = ADA2 (ADGF isoform C) mature form
QTALSYEQARQAVLTAEEELMTGGHTHLNTEEEKVDDIFMEYKLGELAQGFRNAEQNAAALHFFKAKPLIDRSAIFRFLQKMPKGSVLHVHNTASVSSKWVVDDLSYMPGLLRCTTATGQSILSFRRTPKEHKCQSQYVLVSDERRNSLDRQVYDRNFERLINLYTPVPELEYPTITRVWDRFQGMFDGLSDALIYLPAFRAYHWQMLEELYNDNVMYTEIRTSFKTLYDASGRTFPRERTIHELYALNQKFMKLHPDFLGFKVIMAVYRGYELDHLKDIVEVFKKLHQALPHFLVGFDLVGQEDKGKPLYSLLPVLRDLPPTARLFLHGGETNWFGASTDINLLDALLMNTTRIGHGYALAKHPILLNAVKSRRIAVELSPISNQVLHLVWDLRNHPGSQFFALDVPVVICNDDPGFWNAKGLSYDFYYAIMSLAPNNAGLRLLKTLVWNSVRYSTLTEEEQTRAFKILELSWSRFIDDVLEGSVF

SEQ ID NO: 339 - protein, 480 aa, Drosophila melanogaster
  REGION 1..480: note = ADA2 (ADGF isoform D) mature form
TDLPYETLREQIMEAERVASLGGNIWLSSDEEKANSILMNAKRAEIAEGLKTPEKYAPAMHFFQGRQYVRQSEVFRMIQKIPKGAFLHGHNTGMVTSRWIIQNLTTTNNLYTCRNVDGLLVFTYDQSGCHSEVQNVCTERINAEDRGKYERQLEKHINMHGPRPEALLPNRKKIWERFENIFTTVDRLYKYRPTYCAYHKRMLEELCEDNIIYAEIRASLSPLYDDNNRTLSTLEVANELERIVEEFKAKHHDFIGVKVIYAKRNRASEEEMLRRITTFKQLHHAKPNFVIGFDLIGQEDTGEPLNRYINQLSDLPSTANYFFHAGETNWNGRTDWNMMDAILLNTKRIGHAFALPKHPQLWSTIKKRNIAIEVNPISNQVLGFVWDLRNHPASFLIAENFPIVISSDDPGVWGAKGLSYDFYYAFMALAPADADLRFLKQLALNSIKYAVLTSDERRKINRVFQRKWQEFIANVLNPKF

SEQ ID NO: 340 - protein, 515 aa, Macaca mulatta
  REGION 1..515: note = ADA2 (CECR1) mature form
IDEAHLLLKEKMMRLGGPLVLTTKEEQANERLMTLKIAEMKEAMKTLIFPPSMHFFQAKHLIERSQVFNILRMMPKGAALHLHDTGIVTMDWLVRNVTYRPHCHICFTSKGIMQFRFAHPTPRTSEKCSKWILLEDYRKRVQNVTEFDDSLLRNFTLVTQHPEVIYTNQNVVWSKFQTIFFTISGLIRYAPVFRDYVFRSMQEFYEDNVLYMEIRARLLPLSPLCSHCVPLLSLVALAALQLLHLELGKQCGGEQVYELSGEHHDEEWSVKTYQEVAQKFVETHPEFIGIKIIYSDDRSKDVTVIAESIRTAMGLRTKFPTVVAGFDLVGHEDTGHSLHYYKEALMIPARDGGKLPYFFHAGETDWQGTSIDKNILDALMLNTTRIGHGFALSKHPAARAYSWEKDIPIEVCPISNQVLKLVSDLRNHPVAALMAIGHPMVISSDDPAMFGAKGLSYDFYEAFMGIGGMKADLRTLKQLAMNSIRYSTLLETEKNTFMEIWKKRWDKFIADVATK

SEQ ID NO: 341 - protein, 485 aa, Bombyx mori
  REGION 1..485: note = ADA2 (ADGF) mature form
DPPDINEYHRRRNTLSRNELRLTVGGNMTLSDKESEVNNCIMQLKFQEIDYAFDHPRYYNFSQHYFKYKDTMRKRRLYQILKVMPKGALLHVHDMSLLGPDYLMNITYMQDLYVCLYKETVGFRFSSKTPNAPCKGKWQDISKVRSSVENVTKFDEELRKHFTLVVDDPDTVYGCITDTWTKFMDYFLTVDPLLTYRPVWEKYFYDALMKFREDNVLYVEFRSVLPSLYELDGTAFDPVVTAKAYRKVIRKFVKDYPDFIGAKLIYAPSRRVNRSVLSTYLQIAKDVKNDMPDIFAGFDLVGQEDLGEPLIEFAPQLLEASESLDYFFHAGETDWLGTLTDENLMDAILLGAKRIGHAYALAKHPLLLEEVIKNDIGLEINIISNAVLSLVRDVRNHPLSTFLSKGLPVVISSDDPGAWEAEPLTDDFYVAFVGAASRLADLRLLKQLALNSFTYSSLEDRQKIEALRRFKRNWDSFINNFKCPL

SEQ ID NO: 342 - protein, 535 aa, Sarcophaga perigrina
  REGION 1..535: note = ADA2 (IDGF) mature form
HNEARRASLRANHMVQHAPHIEPQASVIGGRPTPEAYNSLRDIFFRYEESKTLGADITLTQKELQANQLIMEAKTREYEEGLATPHLFTPSQHLFEVLDDIKQSPLFKYISSMPKGAVLHAHDTALCSTDFLIRLTYRDNLWVCQGKGDKEVIGMRFSKTKPDVATQADCTWELLSKVRELHGADKVDTYLREHLTLYPTVKFLDNNEAWEQFGSIFALLDGLLFYAPSWADYYYNALKEFHADGVQYLEFRSTLPILYDLEGTSFTELDTVRIYKETLDKYMAEHIDFIGSKLIYAPIRNTDKEGLDNYIKVCVEIKEKYPDFVAGFDLVGQEEKGRPLKDFIPQLLGMPENIDFYFHAGETNWFGSTVDENLIDAVLLGTKRIGHGFALVKHPLVLQMLKERNIAIEVNPISNQVLQLVADYRNHPCAYFFADNYPVVISSDDPSFWKATPLSHDFYIAFLGIASAHSDMRLLKKLALNSINYSSLSPEQKRVALAKWQIKWDDFIDEVLSGNYDNNGSNNAAQHRLNTNKII

SEQ ID NO: 343 - protein, 5 aa, synthetic construct
  REGION 1..5: note = linker
GGGGS

SEQ ID NO: 344 - protein, 5 aa, synthetic construct
  REGION 1..5: note = linker
SSSSG

SEQ ID NO: 345 - protein, 12 aa, synthetic construct
  REGION 1..12: note = linker
GKSSGSGSESKS

SEQ ID NO: 346 - protein, 15 aa, synthetic construct
  REGION 1..15: note = linker
GGSTSGSGKSSEGKG

SEQ ID NO: 347 - protein, 19 aa, synthetic construct
  REGION 1..19: note = linker
GSTSGSGKSSSEGSGSTKG

SEQ ID NO: 348 - protein, 18 aa, synthetic construct
  REGION 1..18: note = linker
GSTSGSGKPGSGEGSTKG

SEQ ID NO: 349 - protein, 14 aa, synthetic construct
  REGION 1..14: note = linker
EGKSSGSGSESKEF

SEQ ID NO: 350 - protein, 4 aa, synthetic construct
  REGION 1..4: note = linker
AAPA

SEQ ID NO: 351 - DNA, 27 bp, synthetic construct
  misc_feature 1..27: note = Gly4Ser with NcoI ends
  source 1..27: mol_type = other DNA
ccatgggcggcggcggctctgccatgg

SEQ ID NO: 352 - DNA, 42 bp, synthetic construct
  misc_feature 1..42: note = (Gly4Ser)2with NcoI ends
  source 1..42: mol_type = other DNA
ccatgggcggcggcggctctggcggcggcggctctgccatgg

SEQ ID NO: 353 - DNA, 75 bp, synthetic construct
  misc_feature 1..75: note = (Ser4Gly)4 with NcoI ends
  source 1..75: mol_type = other DNA
ccatggcctcgtcgtcgtcgggctcgtcgtcgtcgggctcgtcgtcgtcgggctcgtcgtcgtcgggcgccatgg

SEQ ID NO: 354 - DNA, 45 bp, synthetic construct
  misc_feature 1..45: note = (Ser4Gly)2with NcoI ends
  source 1..45: mol_type = other DNA
ccatggcctcgtcgtcgtcgggctcgtcgtcgtcgggcgccatgg

SEQ ID NO: 355 - protein, 330 aa, Homo sapiens [sequence omitted]

SEQ ID NO: 356 - protein, 326 aa, Homo sapiens
  REGION 1..326: note = hIgG2 heavy chain constant
ASTKGPSVFPLAPCSRSTSESTAALGCLVKDYFPEPVTVSWNSGALTSGVHTFPAVLQSSGLYSLSSVVTVPSSNFGTQTYTCNVDHKPSNTKVDKTVERKCCVECPPCPAPPVAGPSVFLFPPKPKDTLMISRTPEVTCVVVDVSHEDPEVQFNWYVDGVEVHNAKTKPREEQFNSTFRVVSVLTVVHQDWLNGKEYKCKVSNKGLPAPIEKTISKTKGQPREPQVYTLPPSREEMTKNQVSLTCLVKGFYPSDIAVEWESNGQPENNYKTTPPMLDSDGSFFLYSKLTVDKSRWQQGNVFSCSVMHEALHNHYTQKSLSLSPGK

SEQ ID NO: 357 - protein, 377 aa, Homo sapiens
  REGION 1..377: note = hIgG3 heavy chain constant
ASTKGPSVFPLAPCSRSTSGGTAALGCLVKDYFPEPVTVSWNSGALTSGVHTFPAVLQSSGLYSLSSVVTVPSSSLGTQTYTCNVNHKPSNTKVDKRVELKTPLGDTTHTCPRCPEPKSCDTPPPCPRCPEPKSCDTPPPCPRCPEPKSCDTPPPCPRCPAPELLGGPSVFLFPPKPKDTLMISRTPEVTCVVVDVSHEDPEVQFKWYVDGVEVHNAKTKPREEQYNSTFRVVSVLTVLHQDWLNGKEYKCKVSNKALPAPIEKTISKTKGQPREPQVYTLPPSREEMTKNQVSLTCLVKGFYPSDIAVEWESSGQPENNYNTTPPMLDSDGSFFLYSKLTVDKSRWQQGNIFSCSVMHEALHNRFTQKSLSLSPGK

SEQ ID NO: 358 - protein, 327 aa, Homo sapiens
  REGION 1..327: note = hIgG4 heavy chain constant
ASTKGPSVFPLAPCSRSTSESTAALGCLVKDYFPEPVTVSWNSGALTSGVHTFPAVLQSSGLYSLSSVVTVPSSSLGTKTYTCNVDHKPSNTKVDKRVESKYGPPCPSCPAPEFLGGPSVFLFPPKPKDTLMISRTPEVTCVVVDVSQEDPEVQFNWYVDGVEVHNAKTKPREEQFNSTYRVVSVLTVLHQDWLNGKEYKCKVSNKGLPSSIEKTISKAKGQPREPQVYTLPPSQEEMTKNQVSLTCLVKGFYPSDIAVEWESNGQPENNYKTTPPVLDSDGSFFLYSRLTVDKSRWQEGNVFSCSVMHEALHNHYTQKSLSLSLGK

SEQ ID NO: 359 - protein, 231 aa, synthetic construct
  REGION 1..231: note = hIgG1 Fc
PKSCDKTHTCPPCPAPELLGGPSVFLFPPKPKDTLMISRTPEVTCVVVDVSHEDPEVKFNWYVDGVEVHNAKTKPREEQYNSTYRVVSVLTVLHQDWLNGKEYKCKVSNKALPAPIEKTISKAKGQPREPQVYTLPPSREEMTKNQVSLTCLVKGFYPSDIAVEWESNGQPENNYKTTPPVLDSDGSFFLYSKLTVDKSRWQQGNVFSCSVMHEALHNHYTQKSLSLSPGK

SEQ ID NO: 360 - protein, 5 aa, synthetic construct
  REGION 1..5: note = linker
GGGGG

SEQ ID NO: 361 - protein, 223 aa, Homo sapiens
  REGION 1..223: note = fragment of IgG1 heavy chain
TCPPCPAPELLGGPSVFLFPPKPKDTLMISRTPEVTCVVVDVSHEDPEVKFNWYVDGVEVHNAKTKPREEQYNSTYRVVSVLTVLHQDWLNGKEYKCKVSNKALPAPIEKTISKAKGQPREPQVYTLPPSRDELTKNQVSLTCLVKGFYPSDIAVEWESNGQPENNYKTTPPVLDSDGPFFLYSKLTVDKSRWQQGNVFSCSVMHEALHNHYTQKSLSLSPGK

SEQ ID NO: 362 - protein, 4 aa, synthetic construct
  REGION 1..4: note = linker
GGGG

SEQ ID NO: 363 - protein, 7 aa, synthetic construct
  REGION 1..7: note = linker
SGGSGGS

SEQ ID NO: 364 - protein, 15 aa, synthetic construct
  REGION 1..15: note = linker
GGSGGSGGSGGSGGG

SEQ ID NO: 365 - protein, 16 aa, synthetic construct
  REGION 1..16: note = linker
GGSGGSGGGGSGGGGS

SEQ ID NO: 366 - protein, 18 aa, synthetic construct
  REGION 1..18: note = linker
GGSGGSGGSGGSGGSGGS

SEQ ID NO: 367 - protein, 15 aa, synthetic construct
  REGION 1..15: note = linker
GGGGSGGGGSGGGGS

SEQ ID NO: 368-369 - skipped (2 entries)

SEQ ID NO: 370 - protein, 7 aa, synthetic construct
  REGION 1..7: note = linker
GGGGGGG

SEQ ID NO: 371 - protein, 10 aa, synthetic construct
  REGION 1..10: note = linker
GGGGGGGGGG

SEQ ID NO: 372 - protein, 15 aa, synthetic construct
  REGION 1..15: note = linker
GGGGGGGGGGGGGGG

SEQ ID NO: 373 - protein, 864 aa, synthetic construct
  REGION 1..864: note = XTEN
SPAGSPTSTEEGTSESATPESGPGTSTEPSEGSAPGSPAGSPTSTEEGTSTEPSEGSAPGTSTEPSEGSAPGTSESATPESGPGSEPATSGSETPGSEPATSGSETPGSPAGSPTSTEEGTSESATPESGPGTSTEPSEGSAPGTSTEPSEGSAPGSPAGSPTSTEEGTSTEPSEGSAPGTSTEPSEGSAPGTSESATPESGPGTSTEPSEGSAPGTSESATPESGPGSEPATSGSETPGTSTEPSEGSAPGTSTEPSEGSAPGTSESATPESGPGTSESATPESGPGSPAGSPTSTEEGTSESATPESGPGSEPATSGSETPGTSESATPESGPGTSTEPSEGSAPGTSTEPSEGSAPGTSTEPSEGSAPGTSTEPSEGSAPGTSTEPSEGSAPGTSTEPSEGSAPGSPAGSPTSTEEGTSTEPSEGSAPGTSESATPESGPGSEPATSGSETPGTSESATPESGPGSEPATSGSETPGTSESATPESGPGTSTEPSEGSAPGTSESATPESGPGSPAGSPTSTEEGSPAGSPTSTEEGSPAGSPTSTEEGTSESATPESGPGTSTEPSEGSAPGTSESATPESGPGSEPATSGSETPGTSESATPESGPGSEPATSGSETPGTSESATPESGPGTSTEPSEGSAPGSPAGSPTSTEEGTSESATPESGPGSEPATSGSETPGTSESATPESGPGSPAGSPTSTEEGSPAGSPTSTEEGTSTEPSEGSAPGTSESATPESGPGTSESATPESGPGTSESATPESGPGSEPATSGSETPGSEPATSGSETPGSPAGSPTSTEEGTSTEPSEGSAPGTSTEPSEGSAPGSEPATSGSETPGTSESATPESGPGTSTEPSEGSAPG

SEQ ID NO: 374 - protein, 523 aa, Callithrix jacchus
  REGION 1..523: note = ADA2 (CECR1)
  SIGNAL 1..27
MLGNGPSGWSALCFLLLAAAVSFFGSALSMDETREHLLTKEKMMQLGGQLVLNIKEERANEKLMTLKVTEMKEAMKTLLFPPSMHFFRAKHLIDRSQVFNILRMMPKGAALHLHDIGIVTMDWLVRNVTYRPHCHICFTTKGIVQFRFAHPTPRTSEECPKWILLEDYRRRVQNVTDFDDRVHPGVLLLGDASLLRNFTLVTQHPEVIYTDQNAVWSKFKTIFSTISGLIHYAPVFRDYVFQSMQEFYEDNVLYMEIRARLLPVYELSGEQHDLQWSVKGYQEVAEKFVETHPEFIGIKIIYSDHRSKDVTVIAGSIRTAMGLRTKFPTVVAGFDLVGREDTGHSLHYHNRALMIPAKDGVKLPYFFHAGETDWQGTSIDKNILDALMLNTTRIGHGFALNKHPALRAYSRKKDVPVEVCPISNQVLKLVSDLRNHPAATLMATGHPMVISSDDPAIFGAKGLSYDFYEVFMGIGGMKADLRTLKQLAINSIKYSSLLETEKNTFMAVWKKRWDKFIAHVATD

SEQ ID NO: 375 - protein, 496 aa, Callithrix jacchus
  REGION 1..496: note = ADA2 (CECR1) mature form
LSMDETREHLLTKEKMMQLGGQLVLNIKEERANEKLMTLKVTEMKEAMKTLLFPPSMHFFRAKHLIDRSQVFNILRMMPKGAALHLHDIGIVTMDWLVRNVTYRPHCHICFTTKGIVQFRFAHPTPRTSEECPKWILLEDYRRRVQNVTDFDDRVHPGVLLLGDASLLRNFTLVTQHPEVIYTDQNAVWSKFKTIFSTISGLIHYAPVFRDYVFQSMQEFYEDNVLYMEIRARLLPVYELSGEQHDLQWSVKGYQEVAEKFVETHPEFIGIKIIYSDHRSKDVTVIAGSIRTAMGLRTKFPTVVAGFDLVGREDTGHSLHYHNRALMIPAKDGVKLPYFFHAGETDWQGTSIDKNILDALMLNTTRIGHGFALNKHPALRAYSRKKDVPVEVCPISNQVLKLVSDLRNHPAATLMATGHPMVISSDDPAIFGAKGLSYDFYEVFMGIGGMKADLRTLKQLAINSIKYSSLLETEKNTFMAVWKKRWDKFIAHVATD

SEQ ID NO: 376 - protein, 511 aa, Homo sapiens
  REGION 1..511: note = Dendritic cell derived growth factor (DCDGF)
  SIGNAL 1..29
MLVDGPSERPALCFLLLAVAMSFFGSALSIDETRAHLLLKEKMMRLGGRLVLNTKEELANERLMTLKIAEMKEAMRTLIFPPSMHFFQAKHLIERSQVFNILRMMPKGAALHLHDIGIVTMDWLVRNVTYRPHCHICFTPRGIMQFRFAHPTPRPSEKCSKWILLEDYRKRVQNVTEFDDSLLRNFTLVTQHPEVIYTNQNVVWSKFETIFFTISGLIHYAPVFRDYVFRSMQEFYEDNVLYMEIRARLLPVYELSGEHHDEEWSVKTYQEVAQKFVETHPEFIGIKIIYSDHRSKDVAVIAESIRMAMGLRIKFPTVVAGFDLVGHEDTGHSLRDYKEALMIPAKDGVKLPYFFHAGETDWQGTSIDRNILDALMLNTTRIGHGFALSKHPAVRTYSWKKDIPIEVCPISNQVLKLVSDLRNHPVATLMATGHPMVISSDDPAMFGAKGLSYDFYEVFMGIGGMKADLRTLKQLAMNSIKYSTLLESEKNTSMEIWKKRWDKFIADVATK

SEQ ID NO: 377 - protein, 511 aa, Homo sapiens [sequence omitted]

SEQ ID NO: 378 - protein, 511 aa, Homo sapiens [sequence omitted]

SEQ ID NO: 379 - protein, 511 aa, Homo sapiens
  REGION 1..511: note = ADA2 (CECR1)
  SIGNAL 1..29
MLVDGPSERPALCFLLLAVAMSFFGSALSIDETRAHLLLKEKMMRLGGRLVLNTKEELANERLMTLKIAEMKEAMRTLIFPPSMHFFQAKHLIERSQVFNILRMMPKGAALHLHDIGIVTMDWLVRNVTYRPHCHICFTPRGIMQFRFAHPTPRPSEKCSKWILLEDYRKRVQNVTEFDDSLLRNFTLVTQHPEVIYTNQNVVWSKFETIFFTISGLIHYAPVFRDYVFRSMQEFYEDNVLYMEIRARLLPVYELSGEHHDEEWSVKTYQEVAQKFVETHPEFIGIKIIYSDHRSKDVAVIAESIRMAMGLRIKFPTVVAGFDLVGHEDTGHSLHDYKEALMIPAKDGVKLPYFFHAGETDWQGTSIDRNILDALMLNTTRIGHGFALSKHPALRTYSWKKDIPIEVCPISNQVLKLVSDLRNHPVATLMATGHPMVISSDDPAMFGAKGLSYDFYEVFMGIGGMKADLRTLKQLAMNSIKYSTLLESEKNTFMEIWKKRWDKFIADVATK

SEQ ID NO: 380 - protein, 482 aa, Homo sapiens
  REGION 1..482: note = Dendritic cell derived growth factor (DCDGF)mature form
IDETRAHLLLKEKMMRLGGRLVLNTKEELANERLMTLKIAEMKEAMRTLIFPPSMHFFQAKHLIERSQVFNILRMMPKGAALHLHDIGIVTMDWLVRNVTYRPHCHICFTPRGIMQFRFAHPTPRPSEKCSKWILLEDYRKRVQNVTEFDDSLLRNFTLVTQHPEVIYTNQNVVWSKFETIFFTISGLIHYAPVFRDYVFRSMQEFYEDNVLYMEIRARLLPVYELSGEHHDEEWSVKTYQEVAQKFVETHPEFIGIKIIYSDHRSKDVAVIAESIRMAMGLRIKFPTVVAGFDLVGHEDTGHSLRDYKEALMIPAKDGVKLPYFFHAGETDWQGTSIDRNILDALMLNTTRIGHGFALSKHPAVRTYSWKKDIPIEVCPISNQVLKLVSDLRNHPVATLMATGHPMVISSDDPAMFGAKGLSYDFYEVFMGIGGMKADLRTLKQLAMNSIKYSTLLESEKNTSMEIWKKRWDKFIADVATK

SEQ ID NO: 381 - protein, 482 aa, Homo sapiens
  REGION 1..482: note = ADA2 (CECR1) mature form
IDETRARLLLKEKMMRLGGRLVLNTKEELANERLMTLKIAEMKEAMRTLIFPPSMHFFQAKHLIERSQVFNILRMMPKGAALHLHDIGIVTMDWLVRNVTYRPHCHICFTPRGIMQFRFARPTPRPSEKCSKWILLEDYRRRVQNVTEFDDSLLRNFTLVTQHPEVIYTNQNVVWSKFETIFFTISGLIHYAPVFRDYVFRSMQEFYEDNVLYMEIRARLLPVYELSGEHHDEEWSVKTYQEVAQKFVETHPEFIGIKIIYSDHRSKDVAVIAESIRMAMGLRIKFPTVVAGFDLVGHEDTGHSLRDYKEALMIPAKDGVKLPYFFHAGETDWQGTSIDRNILDALMLNTTRIGHGFALSKHPAVRTYSWKKDIPIEVCPISNQVLKLVSDLRNHPVATLMATGHPMVISSDDPAMFGAKGLSYDFYEVFMGIGGMKADLRTLKQLAMNSIKYSTLLESEKNTFMEIWKKRWDKFIADVATK

SEQ ID NO: 382 - protein, 482 aa, Homo sapiens
  REGION 1..482: note = ADA2 (CECR1)mature form
IDETRAHLLLKEKMMRLGGRLVLNTKEELANERLMTLKIAEMKEAMRTLIFPPSMHFFQAKHLIERSQVFNILRMMPKGAALHLHDIGIVTMDWLVRNVTYRPHCHICFTPRGIMQFRFAHPTPRPSEKCSKWILLEDYRKRVQNVTEFDDSLLRNFTLVTQHPEVIYTNQNVVWSKFETIFFTISGLIHYAPVFRDYVFRSMQEFYEDNVLYMEIRARLLPVYELSGEHHDEEWSVKTYQEVAQKFVETHPEFIGIKIIYSDHRSKDVAVIAESIRMAMGLRIKFPTVVAGFDLVGHEDTGHSLRDYKEALMIPAKDGVKLPYFFHAGETDWQGTSIDRNILDALMLNTTRIGHGFALSKHPAVRTYSWKKDIPIEVCPISNQVLKLVSDLRNHPVATLMATGHPMVISSDDPAMFGAKGLSYDFYEVFMGIGGMKADLRTLKQLAMNSIKYSTLLESEKNTFMEIWKKRWDKFIADVATK

SEQ ID NO: 383 - protein, 482 aa, Homo sapiens
  REGION 1..482: note = ADA2 (CECR1)mature form
IDETRAHLLLKEKMMRLGGRLVLNTKEELANERLMTLKIAEMKEAMRTLIFPPSMHFFQAKHLIERSQVFNILRMMPKGAALHLHDIGIVTMDWLVRNVTYRPHCHICFTPRGIMQFRFAHPTPRPSEKCSKWILLEDYRKRVQNVTEFDDSLLRNFTLVTQHPEVIYTNQNVVWSKFETIFFTISGLIHYAPVFRDYVFRSMQEFYEDNVLYMEIRARLLPVYELSGEHHDEEWSVKTYQEVAQKFVETHPEFIGIKIIYSDHRSKDVAVIAESIRMAMGLRIKFPTVVAGFDLVGHEDTGHSLHDYKEALMIPAKDGVKLPYFFHAGETDWQGTSIDRNILDALMLNTTRIGHGFALSKHPALRTYSWKKDIPIEVCPISNQVLKLVSDLRNHPVATLMATGHPMVISSDDPAMFGAKGLSYDFYEVFMGIGGMKADLRTLKQLAMNSIKYSTLLESEKNTFMEIWKKRWDKFIADVATK

SEQ ID NO: 384 - DNA, 40 bp, synthetic construct
  misc_feature 1..40: note = CTLA-4 binding aptamer M9a-8
  source 1..40: mol_type = other DNA
accacagcctttatccaagcgggtgagccccgtgaacaat

SEQ ID NO: 385 - DNA, 40 bp, synthetic construct
  misc_feature 1..40: note = CTLA-4 binding aptamer M9a-9
  source 1..40: mol_type = other DNA
ccgacgtgccgcaacttcaaccctgcacaaccaatccgcc

SEQ ID NO: 386 - DNA, 40 bp, synthetic construct
  misc_feature 1..40: note = CTLA-4 binding aptamer M9a-14
  source 1..40: mol_type = other DNA
caacgaaaggtgctccactaagaatggaacttctgcgatc

SEQ ID NO: 387 - DNA, 40 bp, synthetic construct
  misc_feature 1..40: note = CTLA-4 binding aptamer M9a-15
  source 1..40: mol_type = other DNA
gtgctcaatcacgaacccgctcgacttcttctcccaagcc

SEQ ID NO: 388 - DNA, 40 bp, synthetic construct
  misc_feature 1..40: note = CTLA-4 binding aptamer M9a-18
  source 1..40: mol_type = other DNA
tgctccaacactcacttcggaaccacctgcattccgctct

SEQ ID NO: 389 - DNA, 355 bp, synthetic construct
  misc_feature 1..355: note = Ipilimumab heavy chain varible domain (VH)
  source 1..355: mol_type = other DNA
caggtgcagctggtggagtctgggggaggcgtggtccagcctgggaggtccctgagactctcctgtgcagcctctggattcaccttcagtagctatactatgcactgggtccgccaggctccaggcaaggggctggagtgggtgacatttatatcatatgatggaaacaataaatactacgcagactccgtgaagggccgattcaccatctccagagacaattccaagaacacgctgtatctgcaaatgaacagcctgagagctgaggacacggctatatattactgtgcgaggaccggctggctggggccctttgactactggggccagggaaccctggtcaccgtctcctcag

SEQ ID NO: 390 - protein, 118 aa, synthetic construct
  REGION 1..118: note = Ipilimumab heavy chain varible domain (VH)
QVQLVESGGGVVQPGRSLRLSCAASGFTFSSYTMHWVRQAPGKGLEWVTFISYDGNNKYYADSVKGRFTISRDNSKNTLYLQMNSLRAEDTAIYYCARTGWLGPFDYWGQGTLVTVSS

SEQ ID NO: 391 - DNA, 325 bp, synthetic construct
  misc_feature 1..325: note = Ipilimumab light chain varible domain (VH)
  source 1..325: mol_type = other DNA
gaaattgtgttgacgcagtctccaggcaccctgtctttgtctccaggggaaagagccaccctctcctgcagggccagtcagagtgttggcagcagctacttagcctggtaccagcagaaacctggccaggctcccaggctcctcatctatggtgcattcagcagggccactggcatcccagacaggttcagtggcagtgggtctgggacagacttcactctcaccatcagcagactggagcctgaagattttgcagtgtattactgtcagcagtatggtagctcaccgtggacgttcggccaagggaccaaggtggaaatcaaac

SEQ ID NO: 392 - protein, 108 aa, synthetic construct
  REGION 1..108: note = Ipilimumab light chain varible domain (VH)
EIVLTQSPGTLSLSPGERATLSCRASQSVGSSYLAWYQQKPGQAPRLLIYGAFSRATGIPDRFSGSGSGTDFTLTISRLEPEDFAVYYCQQYGSSPWTFGQGTKVEIK

SEQ ID NO: 393 - protein, 5 aa, synthetic construct
  REGION 1..5: note = Ipilimumab VH CDR1
SYTMH

SEQ ID NO: 394 - protein, 17 aa, synthetic construct
  REGION 1..17: note = Ipilimumab VH CDR2
FISYDGNNKYYADSVKG

SEQ ID NO: 395 - protein, 9 aa, synthetic construct
  REGION 1..9: note = Ipilimumab VH CDR3
TGWLGPFDY

SEQ ID NO: 396 - protein, 12 aa, synthetic construct
  REGION 1..12: note = Ipilimumab VL CDR1
RASQSVGSSYLA

SEQ ID NO: 397 - protein, 7 aa, synthetic construct
  REGION 1..7: note = Ipilimumab VL CDR2
GAFSRAT

SEQ ID NO: 398 - protein, 9 aa, synthetic construct
  REGION 1..9: note = Ipilimumab VL CDR3
QQYGSSPWT

SEQ ID NO: 399 - DNA, 500 bp, synthetic construct
  misc_feature 1..500: note = Tremelimumab heavy chain varible domain (VH)
  source 1..500: mol_type = other DNA
ggcgtggtccagcctgggaggtccctgagactctcctgtgcagcgtctggattcaccttcagtagctatggcatgcactgggtccgccaggctccaggcaaggggctggagtgggtggcagttatatggtatgatggaagtaataaatactatgcagactccgtgaagggccgattcaccatctccagagacaattccaagaacacgctgtatctgcaaatgaacagcctgagagccgaggacacggctgtgtattactgtgcgagagatccgaggggagctaccctttactactactactacgggatggacgtctggggccaagggaccacggtcaccgtctcctcagcctccaccaagggcccatcggtcttccccctggcgccctgctccaggagcacctccgagagcacagcggccctgggctgcctggtcaaggactacttccccgaaccggtgacggtgtcgtggaactcaggcgctctgaccagcggcgtgca

SEQ ID NO: 400 - protein, 167 aa, synthetic construct
  REGION 1..167: note = Tremelimumab heavy chain varible domain (VH)
GVVQPGRSLRLSCAASGFTFSSYGMHWVRQAPGKGLEWVAVIWYDGSNKYYADSVKGRFTISRDNSKNTLYLQMNSLRAEDTAVYYCARDPRGATLYYYYYGMDVWGQGTTVTVSSASTKGPSVFPLAPCSRSTSESTAALGCLVKDYFPEPVTVSWNSGALTSGVH

SEQ ID NO: 401 - DNA, 417 bp, synthetic construct
  misc_feature 1..417: note = Tremelimumab light chain varible domain (VH)
  source 1..417: mol_type = other DNA
ccatcctccctgtctgcatctgtaggagacagagtcaccatcacttgccgggcaagtcagagcattaacagctatttagattggtatcagcagaaaccagggaaagcccctaaactcctgatctatgctgcatccagtttgcaaagtggggtcccatcaaggttcagtggcagtggatctgggacagatttcactctcaccatcagcagtctgcaacctgaagattttgcaacttactactgtcaacagtattacagtactccattcactttcggccctgggaccaaagtggaaatcaaacgaactgtggctgcaccatctgtcttcatcttcccgccatctgatgagcagttgaaatctggaactgcctctgttgtgtgcctgctgaataacttctatcccagagaggccaaagta

SEQ ID NO: 402 - protein, 139 aa, synthetic construct
  REGION 1..139: note = Tremelimumab light chain varible domain (VH)
PSSLSASVGDRVTITCRASQSINSYLDWYQQKPGKAPKLLIYAASSLQSGVPSRFSGSGSGTDFTLTISSLQPEDFATYYCQQYYSTPFTFGPGTKVEIKRTVAAPSVFIFPPSDEQLKSGTASVVCLLNNFYPREAKV

SEQ ID NO: 403 - DNA, 339 bp, synthetic construct
  misc_feature 1..339: note = Nivolumab heavy chain variable region
  source 1..339: mol_type = other DNA
caggtgcagctggtggagtctgggggaggcgtggtccagcctgggaggtccctgagactcgactgtaaagcgtctggaatcaccttcagtaactctggcatgcactgggtccgccaggctccaggcaaggggctggagtgggtggcagttatttggtatgatggaagtaaaagatactatgcagactccgtgaagggccgattcaccatctccagagacaattccaagaacacgctgtttctgcaaatgaacagcctgagagccgaggacacggctgtgtattactgtgcgacaaacgacgactactggggccagggaaccctggtcaccgtctcctca

SEQ ID NO: 404 - protein, 113 aa, synthetic construct [sequence omitted]

SEQ ID NO: 405 - DNA, 321 bp, synthetic construct
  misc_feature 1..321: note = Nivolumab light chain variable region
  source 1..321: mol_type = other DNA
gaaattgtgttgacacagtctccagccaccctgtctttgtctccaggggaaagagccaccctctcctgcagggccagtcagagtgttagtagttacttagcctggtaccaacagaaacctggccaggctcccaggctcctcatctatgatgcatccaacagggccactggcatcccagccaggttcagtggcagtgggtctgggacagacttcactctcaccatcagcagcctagagcctgaagattttgcagtttattactgtcagcagagtagcaactggcctcggacgttcggccaagggaccaaggtggaaatcaaa

SEQ ID NO: 406 - protein, 107 aa, synthetic construct [sequence omitted]

SEQ ID NO: 407 - protein, 5 aa, synthetic construct
  REGION 1..5: note = Nivolumab VH CDR1
NSGMH

SEQ ID NO: 408 - protein, 17 aa, synthetic construct
  REGION 1..17: note = Nivolumab VH CDR2
VIWYDGSKRYYADSVKG

SEQ ID NO: 409 - protein, 4 aa, synthetic construct
  REGION 1..4: note = Nivolumab VH CDR3
NDDY

SEQ ID NO: 410 - protein, 11 aa, synthetic construct
  REGION 1..11: note = Nivolumab VL CDR1
RASQSVSSYLA

SEQ ID NO: 411 - protein, 7 aa, synthetic construct
  REGION 1..7: note = Nivolumab VL CDR2
DASNRAT

SEQ ID NO: 412 - protein, 9 aa, synthetic construct
  REGION 1..9: note = Nivolumab VL CDR3
QQSSNWPRT

SEQ ID NO: 413 - DNA, 1340 bp, synthetic construct
  misc_feature 1..1340: note = MK-3475 full-length heavy chain
  source 1..1340: mol_type = other DNA
aggtgcagctggtgcagtccggcgtggaggtgaagaagcctggcgcctccgtcaaggtgtcctgtaaggcctccggctacaccttcaccaactactacatgtactgggtgcggcaggccccaggccagggactggagtggatgggcggcatcaacccttccaacggcggcaccaacttcaacgagaagttcaagaaccgggtgaccctgaccaccgactcctccaccacaaccgcctacatggaactgaagtccctgcagttcgacgacaccgccgtgtactactgcgccaggcgggactaccggttcgacatgggcttcgactactggggccagggcaccaccgtgaccgtgtcctccgctagcaccaagggcccttccgtgttccctctggccccttgctcccggtccacctccgagtccaccgccgctctgggctgtctggtgaaggactacttccctgagcctgtgaccgtgagctggaactctggcgccctgacctccggcgtgcacaccttccctgccgtgctgcagtcctccggcctgtactccctgtcctccgtggtgaccgtgccttcctcctccctgggcaccaagacctacacctgcaacgtggaccacaagccttccaacaccaaggtggacaagcgggtggagtccaagtacggccctccttgccctccctgccctgcccctgagttcctgggcggaccctccgtgttcctgttccctcctaagcctaaggacaccctgatgatctcccggacccctgaggtgacctgcgtggtggtggacgtgtcccaggaagatcctgaggtccagttcaattggtacgtggatggcgtggaggtgcacaacgccaagaccaagcctcgggaggaacagttcaactccacctaccgggtggtgtctgtgctgaccgtgctgcaccaggactggctgaacggcaaggaatacaagtgcaaggtcagcaacaagggcctgccctcctccatcgagaaaaccatctccaaggccaagggccagcctcgcgagcctcaggtgtacaccctgcctcctagccaggaagagatgaccaagaatcaggtgtccctgacatgcctggtgaagggcttctacccttccgatatcgccgtggagtgggagagcaacggccagccagagaacaactacaagaccacccctcctgtgctggactccgacggctccttcttcctgtactccaggctgaccgtggacaagtcccggtggcaggaaggcaacgtcttttcctgctccgtgatgcacgaggccctgcacaaccactacacccagaagtccctgtccctgtctctgggcaag

SEQ ID NO: 414 - protein, 447 aa, synthetic construct
  REGION 1..447: note = MK-3475 full-length heavy chain
QVQLVQSGVEVKKPGASVKVSCKASGYTFTNYYMYWVRQAPGQGLEWMGGINPSNGGTNFNEKFKNRVTLTTDSSTTTAYMELKSLQFDDTAVYYCARRDYRFDMGFDYWGQGTTVTVSSASTKGPSVFPLAPCSRSTSESTAALGCLVKDYFPEPVTVSWNSGALTSGVHTFPAVLQSSGLYSLSSVVTVPSSSLGTKTYTCNVDHKPSNTKVDKRVESKYGPPCPPCPAPEFLGGPSVFLFPPKPKDTLMISRTPEVTCVVVDVSQEDPEVQFNWYVDGVEVHNAKTKPREEQFNSTYRVVSVLTVLHQDWLNGKEYKCKVSNKGLPSSIEKTISKAKGQPREPQVYTLPPSQEEMTKNQVSLTCLVKGFYPSDIAVEWESNGQPENNYKTTPPVLDSDGSFFLYSRLTVDKSRWQEGNVFSCSVMHEALHNHYTQKSLSLSLGK

SEQ ID NO: 415 - DNA, 334 bp, synthetic construct
  misc_feature 1..334: note = MK-3475 full-length light chain
  source 1..334: mol_type = other DNA
cgagatcgtgctgacccagtcccctgccaccctgtccctgagccctggcgagcgggctaccctgagctgcagagcctccaagggcgtgtccacctccggctactcctacctgcactggtatcagcagaagccaggccaggcccctcggctgctgatctacctggcctcctacctggagtccggcgtgcctgcccggttctccggctccggaagcggcaccgacttcaccctgaccatctcctccctggagcctgaggacttcgccgtgtactactgccagcactcccgggacctgcctctgacctttggcggcggaacaaaggtggagatcaag

SEQ ID NO: 416 - protein, 218 aa, synthetic construct
  REGION 1..218: note = MK-3475 full-length light chain
EIVLTQSPATLSLSPGERATLSCRASKGVSTSGYSYLHWYQQKPGQAPRLLIYLASYLESGVPARFSGSGSGTDFTLTISSLEPEDFAVYYCQHSRDLPLTFGGGTKVEIKRTVAAPSVFIFPPSDEQLKSGTASVVCLLNNFYPREAKVQWKVDNALQSGNSQESVTEQDSKDSTYSLSSTLTLSKADYEKHKVYACEVTHQGLSSPVTKSFNRGEC

SEQ ID NO: 417 - DNA, 361 bp, synthetic construct
  misc_feature 1..361: note = MK-3475 heavy chain variable domain
  source 1..361: mol_type = other DNA
ccaggtgcagctggtgcagtccggcgtggaggtgaagaagcctggcgcctccgtcaaggtgtcctgcaaggcctccggctacaccttcaccaactactacatgtactgggtgcggcaggctcccggccagggactggagtggatgggcggcatcaacccttccaacggcggcaccaacttcaacgagaagttcaagaaccgggtgaccctgaccaccgactcctccaccaccaccgcctacatggagctgaagtccctgcagttcgacgacaccgccgtgtactactgcgccaggcgggactaccggttcgacatgggcttcgactactggggccagggcaccaccgtgaccgtgtcctcc

SEQ ID NO: 418 - protein, 120 aa, synthetic construct [sequence omitted]

SEQ ID NO: 419 - DNA, 333 bp, synthetic construct
  misc_feature 1..333: note = MK-3475 light chain variable domain
  source 1..333: mol_type = other DNA
gaaattgtgttgacacagtctccagccaccctgtctttgtctccaggggaaagagccaccctctcctgcagggccagcaaaggtgtcagtacatctggctatagttatttgcactggtatcaacagaaacctggccaggctcccaggctcctcatctatcttgcatcctacctagaatctggcgtcccagccaggttcagtggtagtgggtctgggacagacttcactctcaccatcagcagcctagagcctgaagattttgcagtttattactgtcagcacagcagggaccttccgctcacgttcggcggagggaccaaagtggagatcaaa

SEQ ID NO: 420 - protein, 111 aa, synthetic construct [sequence omitted]

SEQ ID NO: 421 - protein, 5 aa, synthetic construct
  REGION 1..5: note = MK-3475 VH CDR1
NYYMY

SEQ ID NO: 422 - protein, 17 aa, synthetic construct
  REGION 1..17: note = MK-3475 VH CDR2
GINPSNGGTNFNEKFKN

SEQ ID NO: 423 - protein, 11 aa, synthetic construct
  REGION 1..11: note = MK-3475 VH CDR3
RDYRFDMGFDY

SEQ ID NO: 424 - protein, 15 aa, synthetic construct
  REGION 1..15: note = MK-3475 VL CDR1
RASKGVSTSGYSYLH

SEQ ID NO: 425 - protein, 7 aa, synthetic construct
  REGION 1..7: note = MK-3475 VL CDR2
LASYLES

SEQ ID NO: 426 - protein, 9 aa, synthetic construct
  REGION 1..9: note = MK-3475 VL CDR3
QHSRDLPLT

SEQ ID NO: 427 - DNA, 1401 bp, synthetic construct
  misc_feature 1..1401: note = Pidilizumab full-length heavy chain
  source 1..1401: mol_type = other DNA
atggactggacctggaggatcctcttcttggtggcagcagcaacaggtgcccactcccaggtgcagctggtgcaatctgggtctgagcttaagaagcctggggcctcagtgaagatctcctgcaaggcttctggatatactttcacaaactatggaatgaactgggtgcgacaggcccctggacaagggcttcagtggatgggatggataaacaccgacagtggagagtcaacatatgctgaagagttcaagggacggtttgtcttctccttggacacctctgtcaacacggcatatctgcagatcaccagcctcacggctgaggacactggcatgtatttctgtgtgagagtcggctacgatgctttggactactggggccagggaaccctggtcaccgtctcgagcgcctccaccaagggcccatcggtcttccccctggcaccctcctccaagagcacctctgggggcacagcggccctgggctgcctggtcaaggactacttccccgaaccggtgacggtgtcgtggaactcaggcgccctgaccagcggcgtgcacaccttcccggctgtcctacagtcctcaggactctactccctcagcagcgtggtgaccgtgccctccagcagcttgggcacccagacctacatctgcaacgtgaatcacaagcccagcaacaccaaggtggacaagaaagttgagcccaaatcttgtgacaaaactcacacatgcccaccgtgcccagcacctgaactcctggggggaccgtcagtcttcctcttccccccaaaacccaaggacaccctcatgatctcccggacccctgaggtcacatgcgtggtggtggacgtgagccacgaagaccctgaggtcaagttcaactggtacgtggacggcgtggaggtgcataatgccaagacaaagccgcgggaggagcagtacaacagcacgtaccgggtggtcagcgtcctcaccgtcctgcaccaggactggctgaatggcaaggagtacaagtgcaaggtctccaacaaagccctcccagcccccatcgagaaaaccatctccaaagccaaagggcagccccgagaaccacaggtgtacaccctgcccccatcccgggaggagatgaccaagaaccaggtcagcctgacctgcctggtcaaaggcttctatcccagcgacatcgccgtggagtgggagagcaatgggcagccggagaacaactacaagaccacgcctcccgtgctggactccgacggctccttcttcctctacagcaagctcaccgtggacaagagcaggtggcagcaggggaacgtcttctcatgctccgtgatgcatgaggctctgcacaaccactacacgcagaagagcctctccctgtctccgggtaaatga

SEQ ID NO: 428 - protein, 466 aa, synthetic construct
  REGION 1..466: note = Pidilizumab full-length heavy chain
MDWTWRILFLVAAATGAHSQVQLVQSGSELKKPGASVKISCKASGYTFTNYGMNWVRQAPGQGLQWMGWINTDSGESTYAEEFKGRFVFSLDTSVNTAYLQITSLTAEDTGMYFCVRVGYDALDYWGQGTLVTVSSASTKGPSVFPLAPSSKSTSGGTAALGCLVKDYFPEPVTVSWNSGALTSGVHTFPAVLQSSGLYSLSSVVTVPSSSLGTQTYICNVNHKPSNTKVDKKVEPKSCDKTHTCPPCPAPELLGGPSVFLFPPKPKDTLMISRTPEVTCVVVDVSHEDPEVKFNWYVDGVEVHNAKTKPREEQYNSTYRVVSVLTVLHQDWLNGKEYKCKVSNKALPAPIEKTISKAKGQPREPQVYTLPPSREEMTKNQVSLTCLVKGFYPSDIAVEWESNGQPENNYKTTPPVLDSDGSFFLYSKLTVDKSRWQQGNVFSCSVMHEALHNHYTQKSLSLSPGK

SEQ ID NO: 429 - DNA, 708 bp, synthetic construct
  misc_feature 1..708: note = Pidilizumab full-length light chain
  source 1..708: mol_type = other DNA
atggacatgagggtccccgctcagctcctggggctcctgctgctctggctcccaggtgccaaatgtgaaattgtgttgacgcagtctccatcctccctgtctgcatctgtaggagacagagtcaccatcacttgcagtgccaggtcaagtgtaagttacatgcactggttccagcagaaaccagggaaagcccctaagctctggatctataggacatccaacctggcttctggggtcccatctagattcagcggcagtggatctgggacatcttactgtctcaccatcaacagcctgcagcctgaagattttgcaacttactattgccagcaaaggagtagtttcccactcacgttcggcggagggaccaagctggagatcaaacgtactgtggctgcaccatctgtcttcatcttcccgccatctgatgagcagttgaaatctggaactgcctctgttgtgtgcctgctgaataacttctatcccagagaggccaaagtacagtggaaggtggataacgccctccaatcgggtaactcccaggagagtgtcacagagcaggacagcaaggacagcacctacagcctcagcagcaccctgacgctgagcaaagcagactacgagaaacacaaagtctacgcctgcgaagtcacccatcagggcctgagctcgcccgtcacaaagagcttcaacaggggagagtgttag

SEQ ID NO: 430 - protein, 235 aa, synthetic construct
  REGION 1..235: note = Pidilizumab full-length light chain
MDMRVPAQLLGLLLLWLPGAKCEIVLTQSPSSLSASVGDRVTITCSARSSVSYMHWFQQKPGKAPKLWIYRTSNLASGVPSRFSGSGSGTSYCLTINSLQPEDFATYYCQQRSSFPLTFGGGTKLEIKRTVAAPSVFIFPPSDEQLKSGTASVVCLLNNFYPREAKVQWKVDNALQSGNSQESVTEQDSKDSTYSLSSTLTLSKADYEKHKVYACEVTHQGLSSPVTKSFNRGEC

SEQ ID NO: 431 - DNA, 421 bp, synthetic construct
  misc_feature 1..421: note = Pidilizumab heavy chain variable domain
  source 1..421: mol_type = other DNA
atggactggacctggaggatcctcttcttggtggcagcagcaacaggtgcccactcccaggtgcagctggtgcaatctgggtctgagcttaagaagcctggggcctcagtgaagatctcctgcaaggcttctggatatactttcacaaactatggaatgaactgggtgcgacaggcccctggacaagggcttcagtggatgggatggataaacaccgacagtggagagtcaacatatgctgaagagttcaagggacggtttgtcttctccttggacacctctgtcaacacggcatatctgcagatcaccagcctcacggctgaggacactggcatgtatttctgtgtgagagtcggctacgatgctttggactactggggccagggaaccctggtcaccgtctcctcaggtgagtggatcc

SEQ ID NO: 432 - protein, 117 aa, synthetic construct
  REGION 1..117: note = Pidilizumab heavy chain variable domain
QVQLVQSGSELKKPGASVKISCKASGYTFTNYGMNWVRQAPGQGLQWMGWINTDSGESTYAEEFKGRFVFSLDTSVNTAYLQITSLTAEDTGMYFCVRVGYDALDYWGQGTLVTVSS

SEQ ID NO: 433 - DNA, 384 bp, synthetic construct
  misc_feature 1..384: note = Pidilizumab light chain variable domain
  source 1..384: mol_type = other DNA
atggacatgagggtccccgctcagctcctggggctcctgctgctctggctcccaggtgccaaatgtgaaattgtgttgacgcagtctccatcctccctgtctgcatctgtaggagacagagtcaccatcacttgcagtgccaggtcaagtgtaagttacatgcactggttccagcagaaaccagggaaagcccctaagctctggatctataggacatccaacctggcttctggggtcccatctagattcagcggcagtggatctgggacatcttactgtctcaccatcaacagcctgcagcctgaagattttgcaacttactattgccagcaaaggagtagtttcccactcacgttcggcggagggaccaagctggagatcaaa

SEQ ID NO: 434 - protein, 106 aa, synthetic construct
  REGION 1..106: note = Pidilizumab light chain variable domain
EIVLTQSPSSLSASVGDRVTITCSARSSVSYMHWFQQKPGKAPKLWIYRTSNLASGVPSRFSGSGSGTDYCLTINSLQPEDFATYYCQQRSSFPLTFGGGTKLEIK

SEQ ID NO: 435 - protein, 5 aa, synthetic construct
  REGION 1..5: note = Pidilizumab VH CDR1
NYGMN

SEQ ID NO: 436 - protein, 17 aa, synthetic construct
  REGION 1..17: note = Pidilizumab VH CDR2
WINTDSGESTYAEEFKG

SEQ ID NO: 437 - protein, 8 aa, synthetic construct
  REGION 1..8: note = Pidilizumab VH CDR3
VGYDALDY

SEQ ID NO: 438 - protein, 10 aa, synthetic construct
  REGION 1..10: note = Pidilizumab VL CDR1
SARSSVSYMH

SEQ ID NO: 439 - protein, 7 aa, synthetic construct
  REGION 1..7: note = Pidilizumab VL CDR2
RTSNLAS

SEQ ID NO: 440 - protein, 9 aa, synthetic construct
  REGION 1..9: note = Pidilizumab VL CDR3
QQRSSFPLT

SEQ ID NO: 441 - DNA, 369 bp, synthetic construct
  misc_feature 1..369: note = BMS-936559 heavy chain variable region
  source 1..369: mol_type = other DNA
caggtccagctggtgcagtctggggctgaggtgaagaagcctgggtcctcggtgaaggtctcctgcaagacttctggagacaccttcagcacctatgctatcagctgggtgcgacaggcccctggacaagggcttgagtggatgggagggatcatccctatatttggtaaagcacactacgcacagaagttccagggcagagtcacgattaccgcggacgaatccacgagcacagcctacatggagctgagcagcctgagatctgaggacacggccgtgtatttttgtgcgagaaagtttcactttgtttcggggagccccttcggtatggacgtctggggccaagggaccacggtcaccgtctcctca

SEQ ID NO: 442 - protein, 123 aa, synthetic construct
  REGION 1..123: note = BMS-936559 heavy chain variable region
QVQLVQSGAEVKKPGSSVKVSCKTSGDTFSTYAISWVRQAPGQGLEWMGGIIPIFGKAHYAQKFQGRVTITADESTSTAYMELSSLRSEDTAVYFCARKFHFVSGSPFGMDVWGQGTTVTVSS

SEQ ID NO: 443 - DNA, 318 bp, synthetic construct
  misc_feature 1..318: note = BMS-936559 light chain variable region
  source 1..318: mol_type = other DNA
gaaattgtgttgacacagtctccagccaccctgtctttgtctccaggggaaagagccaccctctcctgcagggccagtcagagtgttagcagctacttagcctggtaccaacagaaacctggccaggctcccaggctcctcatctatgatgcatccaacagggccactggcatcccagccaggttcagtggcagtgggtctgggacagacttcactctcaccatcagcagcctagagcctgaagattttgcagtttattactgtcagcagcgtagcaactggccgacgttcggccaagggaccaaggtggaaatcaaa

SEQ ID NO: 444 - protein, 106 aa, synthetic construct
  REGION 1..106: note = BMS-936559 light chain variable region
EIVLTQSPATLSLSPGERATLSCRASQSVSSYLAWYQQKPGQAPRLLIYDASNRATGIPARFSGSGSGTDFTLTISSLEPEDFAVYYCQQRSNWPTFGQGTKVEIK

SEQ ID NO: 445 - protein, 6 aa, synthetic construct
  REGION 1..6: note = BMS-936559 VH CDR1
TYAISW

SEQ ID NO: 446 - protein, 17 aa, synthetic construct
  REGION 1..17: note = BMS-936559 VH CDR2
GIIPIFGKAHYAQKFQG

SEQ ID NO: 447 - protein, 14 aa, synthetic construct
  REGION 1..14: note = BMS-936559 VH CDR3
KFHFVSGSPFGMDV

SEQ ID NO: 448 - protein, 11 aa, synthetic construct
  REGION 1..11: note = BMS-936559 VL CDR1
RASQSVSSYLA

SEQ ID NO: 449 - protein, 7 aa, synthetic construct
  REGION 1..7: note = BMS-936559 VL CDR2
DASNRAT

SEQ ID NO: 450 - protein, 8 aa, synthetic construct
  REGION 1..8: note = BMS-936559 VL CDR3
QQRSNWPT

SEQ ID NO: 451 - DNA, 360 bp, synthetic construct
  misc_feature 1..360: note = MEDI4736 heavy chain variable region
  source 1..360: mol_type = other DNA
gaggtgcagctggtcgagtctggcggcggactggtgaagcctggcggctccctgagactgtcttgcgccgccagtggctttacattcagtacctactccatgaactgggtccgccaggcaccaggcaagggcctggaatgggtgtcctccatctcatccagtggcgactacatctactacgccgactccgtgaagggccggttcaccatctcccgggacaacgccaagaactccctgtatctgcagatgaactccctgagagccgaggacaccgccgtgtactactgcgccagggacctggtgacatccatggtggccttcgactactggggtcagggcactctcgtcacagtgtcctct

SEQ ID NO: 452 - protein, 120 aa, synthetic construct
  REGION 1..120: note = MEDI4736 heavy chain variable region
EVQLVESGGGLVKPGGSLRLSCAASGFTFSTYSMNWVRQAPGKGLEWVSSISSSGDYIYYADSVKGRFTISRDNAKNSLYLQMNSLRAEDTAVYYCARDLVTSMVAFDYWGQGTLVTVSS

SEQ ID NO: 453 - DNA, 324 bp, synthetic construct
  misc_feature 1..324: note = MEDI4736 light chain variable region
  source 1..324: mol_type = other DNA
tcttacgagctgacccagcctccttccgtgtccgtgtctccaggacagacggccagaatcacctgttccggcgacgccctgcctcagaaatacgtgttctggtatcagcagaagtccggccaggcccctgtgctggtgatctacgaggactccaagcggccttccggcatccctgagcggttctccggctcctcttccggcaccatggccaccctgaccatctctggcgcccaggtggaggacgaggccgactactactgctactccaccgacagatccggcaaccacagagtgtttggtgggggtactaagctgaccgtgctg

SEQ ID NO: 454 - protein, 108 aa, synthetic construct
  REGION 1..108: note = MEDI4736 light chain variable region
SYELTQPPSVSVSPGQTARITCSGDALPQKYVFWYQQKSGQAPVLVIYEDSKRPSGIPERFSGSSSGTMATLTISGAQVEDEADYYCYSTDRSGNHRVFGGGTKLTVL

SEQ ID NO: 455 - protein, 5 aa, synthetic construct
  REGION 1..5: note = MEDI4736 VH CDR1
TYSMN

SEQ ID NO: 456 - protein, 17 aa, synthetic construct
  REGION 1..17: note = MEDI4736 VH CDR2
SISSSGDYIYYADSVKG

SEQ ID NO: 457 - protein, 11 aa, synthetic construct
  REGION 1..11: note = MEDI4736 VH CDR3
DLVTSMVAFDY

SEQ ID NO: 458 - protein, 11 aa, synthetic construct
  REGION 1..11: note = MEDI4736 VL CDR1
SGDALPQKYVF

SEQ ID NO: 459 - protein, 7 aa, synthetic construct
  REGION 1..7: note = MEDI4736 VL CDR2
EDSKRPS

SEQ ID NO: 460 - protein, 11 aa, synthetic construct
  REGION 1..11: note = MEDI4736 VL CDR3
YSTDRSGNHRV

SEQ ID NO: 461 - protein, 433 aa, synthetic construct
  REGION 1..433: note = MPDL3280A heavy chain full length
EVQLVESGGGLVQPGGSLRLSCAASGFTFSDSWIHWYRQAPGKGLEWYAWISPYGGSTYYADSVKGRFTISADTSKNTAYLQMNSLRAEDTAVYYCARRHWPGGFDYWGQGTLVTVSSASTGPSVFPLAPSSKSTSGGTAALGCLVKDYFPEPVTVSWNSGALTSGVHTFPAVLQSSGLYSLSSVVTVPSSSLGTQTYICNVNHPSNTKVDKKVEPKSCDTHTCPPCPAPELLGGPSVFLFPPPDTLMISRTPEVTCWVDVSHEDPEVKFNWYVDGVEVHNATKPREEQYASTYRVVSVLTVLHQDWLNGKEYKCVSNALPAPIETISKAGQPREPQVYTLPPSREEMTNQVSLTCLVGFYPSDAVEWESNGQPENNYTTPPVLDSDGSFFLYSKLTVDKSRWQQGNVFSCSVMHEALHNHYTQKSLSLSPGK

SEQ ID NO: 462 - protein, 212 aa, synthetic construct
  REGION 1..212: note = MPDL3280A light chain full length
DIQMTQSPSSLSASVGDRVTITCRASQDVSTAVAWYQQKPGKAPKLLIYSASFLYSGVPSRFSGSGSGTDFTLTISSLQPEDFATYYCQQYLYHPATFGQGTKVEIRTVAAPSVFIFPPSDEQLKSGTASWCLLNNFYPREAKVQWKVDNALQSGNSQESVTEQDSKDSTYSLSSTLTLSKADYEKHKVYACEVTHQGLSSPVTKSFNRGEC

SEQ ID NO: 463 - protein, 118 aa, synthetic construct
  REGION 1..118: note = MPDL3280A heavy chain variable region
EVQLVESGGGLVQPGGSLRLSCAASGFTFSDSWIHWVRQAPGKGLEWVAWISPYGGSTYYADSVKGRFTISADTSKNTAYLQMNSLRAEDTAVYYCARRHWPGGFDYWGQGTLVTVSA

SEQ ID NO: 464 - protein, 108 aa, synthetic construct
  REGION 1..108: note = MPDL3280A light chain variable region
DIQMTQSPSSLSASVGDRVTITCRASQDVSTAVAWYQQKPGKAPKLLIYSASFLYSGVPSRFSGSGSGTDFTLTISSLQPEDFATYYCQQYLYHPATFGQGTKVEIKR

SEQ ID NO: 465 - protein, 10 aa, synthetic construct
  REGION 1..10: note = MPDL3280A VH CDR1
GFTFSDSWIH

SEQ ID NO: 466 - protein, 18 aa, synthetic construct
  REGION 1..18: note = MPDL3280A VH CDR2
AWISPYGGSTYYADSVKG

SEQ ID NO: 467 - protein, 9 aa, synthetic construct
  REGION 1..9: note = MPDL3280A VH CDR3
RHWPGGFDY

SEQ ID NO: 468 - protein, 11 aa, synthetic construct
  REGION 1..11: note = MPDL3280A LH CDR1
RASQDVSTAVA

SEQ ID NO: 469 - protein, 7 aa, synthetic construct
  REGION 1..7: note = MPDL3280A LH CDR2
SASFLYS

SEQ ID NO: 470 - protein, 9 aa, synthetic construct
  REGION 1..9: note = MPDL3280A LH CDR3
QQYLYHPAT

SEQ ID NO: 471 - protein, 10 aa, synthetic construct
  REGION 1..10: note = Tremelimumab VH CDR1
GFTFSSYGMH

SEQ ID NO: 472 - protein, 15 aa, synthetic construct
  REGION 1..15: note = Tremelimumab VH CDR2
VIWYDGSNKYYADSV

SEQ ID NO: 473 - protein, 16 aa, synthetic construct
  REGION 1..16: note = Tremelimumab VH CDR3
DPRGATLYYYYYGMDV

SEQ ID NO: 474 - protein, 11 aa, synthetic construct
  REGION 1..11: note = Tremelimumab VL CDR1
RASQSINSYLD

SEQ ID NO: 475 - protein, 7 aa, synthetic construct
  REGION 1..7: note = Tremelimumab VL CDR2
AASSLQS

SEQ ID NO: 476 - protein, 9 aa, synthetic construct
  REGION 1..9: note = Tremelimumab VL CDR3
QQYYSTPFT

SEQ ID NO: 477 - protein, 434 aa, synthetic construct
  REGION 1..434: note = anti-PD-L1 antibody heavy chain
EVQLVESGGGLVQPGGSLRLSCAASGFTFSDSWIHWYRQAPGKGLEWVAWISPYGGSTYYADSVKGRFTISADTSKNTAYLQMNSLRAEDTAVYYCARRHWPGGFDYWGQGTLVTVSSASTKGPSVFPLAPSSKSTSGGTAALGCLVKDYFPEPVTVSWNSGALTSGVHTFPAVLQSSGLYSLSSVVTVPSSSLGTQTYICNVNHPSNTKVDKKVEPKSCDTHTCPPCPAPELLGGPSVFLFPPPDTLMISRTPEVTCWVDVSHEDPEVKFNWYVDGVEVHNATKPREEQYASTYRVVSVLTVLHQDWLNGKEYKCVSNALPAPIETISKAGQPREPQVYTLPPSREEMTNQVSLTCLVGFYPSDAVEWESNGQPENNYTTPPVLDSDGSFFLYSKLTVDKSRWQQGNVFSCSVMHEALHNHYTQKSLSLSPGK

SEQ ID NO: 478 - protein, 213 aa, synthetic construct
  REGION 1..213: note = anti-PD-L1 antibody light chain
DIQMTQSPSSLSASVGDRVTITCRASQDVSTAVAWYQQKPGKAPKLLIYSASFLYSGVPSRFSGSGSGTDFTLTISSLQPEDFATYYCQQYLYHPATFGQGTKVEIKRTVAAPSVFIFPPSDEQLKSGTASWCLLNNFYPREAKVQWKVDNALQSGNSQESVTEQDSKDSTYSLSSTLTLSKADYEKHKVYACEVTHQGLSSPVTKSFNRGEC

SEQ ID NO: 479 - protein, 434 aa, synthetic construct
  REGION 1..434: note = anti-PD-L1 antibody heavy chain
EVQLVESGGGLVQPGGSLRLSCAASGFTFSDSWIHWVRQAPGKGLEWVAWISPYGGSTYYADSVKGRFTISADTSKNTAYLQMNSLRAEDTAVYYCARRHWPGGFDYWGQGTLVTVSSASTKGPSVFPLAPSSKSTSGGTAALGCLVKDYFPEPVTVSWNSGALTSGVHTFPAVLQSSGLYSLSSVVTVPSSSLGTQTYICNVNHPSNTKVDKKVEPKSCDTHTCPPCPAPELLGGPSVFLFPPPDTLMISRTPEVTCWVDVSHEDPEVKFNWYVDGVEVHNATKPREEQYASTYRVVSVLTVLHQDWLNGKEYKCVSNALPAPIETISKAGQPREPQVYTLPPSREEMTNQVSLTCLVGFYPSDAVEWESNGQPENNYTTPPVLDSDGSFFLYSKLTVDKSRWQQGNVFSCSVMHEALHNHYTQKSLSLSPGK

SEQ ID NO: 480 - protein, 474 aa, Homo sapiens
  REGION 1..474: note = mature human PH20, amino acid residues 36-509
LNFRAPPVIPNVPFLWAWNAPSEFCLGKFDEPLDMSLFSFIGSPRINATGQGVTIFYVDRLGYYPYIDSITGVTVNGGIPQKISLQDHLDKAKKDITFYMPVDNLGMAVIDWEEWRPTWARNWKPKDVYKNRSIELVQQQNVQLSLTEATEKAKQEFEKAGKDFLVETIKLGKLLRPNHLWGYYLFPDCYNHHYKKPGYNGSCFNVEIKRNDDLSWLWNESTALYPSIYLNTQQSPVAATLYVRNRVREAIRVSKIPDAKSPLPVFAYTRIVFTDQVLKFLSQDELVYTFGETVALGASGIVIWGTLSIMRSMKSCLLLDNYMETILNPYIINVTLAAKMCSQVLCQEQGVCIRKNWNSSDYLHLNPDNFAIQLEKGGKFTVRGKPTLEDLEQFSEKFYCSCYSTLSCKEKADVKDTDAVDVCIADGVCIDAFLKPPMETEEPQIFYNASPSTLSATMFIVSILFLIISSVASL

SEQ ID NO: 481 - protein, 447 aa, Homo sapiens [sequence omitted]

SEQ ID NO: 482 - protein, 446 aa, Homo sapiens
  REGION 1..446: note = mature soluble human PH20, amino acid residues36-481
LNFRAPPVIPNVPFLWAWNAPSEFCLGKFDEPLDMSLFSFIGSPRINATGQGVTIFYVDRLGYYPYIDSITGVTVNGGIPQKISLQDHLDKAKKDITFYMPVDNLGMAVIDWEEWRPTWARNWKPKDVYKNRSIELVQQQNVQLSLTEATEKAKQEFEKAGKDFLVETIKLGKLLRPNHLWGYYLFPDCYNHHYKKPGYNGSCFNVEIKRNDDLSWLWNESTALYPSIYLNTQQSPVAATLYVRNRVREAIRVSKIPDAKSPLPVFAYTRIVFTDQVLKFLSQDELVYTFGETVALGASGIVIWGTLSIMRSMKSCLLLDNYMETILNPYIINVTLAAKMCSQVLCQEQGVCIRKNWNSSDYLHLNPDNFAIQLEKGGKFTVRGKPTLEDLEQFSEKFYCSCYSTLSCKEKADVKDTDAVDVCIADGVCIDAFLKPPMETEEPQIF

SEQ ID NO: 483 - protein, 445 aa, Homo sapiens
  REGION 1..445: note = mature soluble human PH20, amino acid residues36-480
LNFRAPPVIPNVPFLWAWNAPSEFCLGKFDEPLDMSLFSFIGSPRINATGQGVTIFYVDRLGYYPYIDSITGVTVNGGIPQKISLQDHLDKAKKDITFYMPVDNLGMAVIDWEEWRPTWARNWKPKDVYKNRSIELVQQQNVQLSLTEATEKAKQEFEKAGKDFLVETIKLGKLLRPNHLWGYYLFPDCYNHHYKKPGYNGSCFNVEIKRNDDLSWLWNESTALYPSIYLNTQQSPVAATLYVRNRVREAIRVSKIPDAKSPLPVFAYTRIVFTDQVLKFLSQDELVYTFGETVALGASGIVIWGTLSIMRSMKSCLLLDNYMETILNPYIINVTLAAKMCSQVLCQEQGVCIRKNWNSSDYLHLNPDNFAIQLEKGGKFTVRGKPTLEDLEQFSEKFYCSCYSTLSCKEKADVKDTDAVDVCIADGVCIDAFLKPPMETEEPQI

SEQ ID NO: 484 - protein, 444 aa, Homo sapiens
  REGION 1..444: note = mature soluble human PH20, amino acid residues36-479
LNFRAPPVIPNVPFLWAWNAPSEFCLGKFDEPLDMSLFSFIGSPRINATGQGVTIFYVDRLGYYPYIDSITGVTVNGGIPQKISLQDHLDKAKKDITFYMPVDNLGMAVIDWEEWRPTWARNWKPKDVYKNRSIELVQQQNVQLSLTEATEKAKQEFEKAGKDFLVETIKLGKLLRPNHLWGYYLFPDCYNHHYKKPGYNGSCFNVEIKRNDDLSWLWNESTALYPSIYLNTQQSPVAATLYVRNRVREAIRVSKIPDAKSPLPVFAYTRIVFTDQVLKFLSQDELVYTFGETVALGASGIVIWGTLSIMRSMKSCLLLDNYMETILNPYIINVTLAAKMCSQVLCQEQGVCIRKNWNSSDYLHLNPDNFAIQLEKGGKFTVRGKPTLEDLEQFSEKFYCSCYSTLSCKEKADVKDTDAVDVCIADGVCIDAFLKPPMETEEPQ

SEQ ID NO: 485 - protein, 443 aa, Homo sapiens
  REGION 1..443: note = mature soluble human PH20, amino acid residues36-478
LNFRAPPVIPNVPFLWAWNAPSEFCLGKFDEPLDMSLFSFIGSPRINATGQGVTIFYVDRLGYYPYIDSITGVTVNGGIPQKISLQDHLDKAKKDITFYMPVDNLGMAVIDWEEWRPTWARNWKPKDVYKNRSIELVQQQNVQLSLTEATEKAKQEFEKAGKDFLVETIKLGKLLRPNHLWGYYLFPDCYNHHYKKPGYNGSCFNVEIKRNDDLSWLWNESTALYPSIYLNTQQSPVAATLYVRNRVREAIRVSKIPDAKSPLPVFAYTRIVFTDQVLKFLSQDELVYTFGETVALGASGIVIWGTLSIMRSMKSCLLLDNYMETILNPYIINVTLAAKMCSQVLCQEQGVCIRKNWNSSDYLHLNPDNFAIQLEKGGKFTVRGKPTLEDLEQFSEKFYCSCYSTLSCKEKADVKDTDAVDVCIADGVCIDAFLKPPMETEEP

SEQ ID NO: 486 - protein, 442 aa, Homo sapiens
  REGION 1..442: note = mature soluble human PH20, amino acid residues36-477
LNFRAPPVIPNVPFLWAWNAPSEFCLGKFDEPLDMSLFSFIGSPRINATGQGVTIFYVDRLGYYPYIDSITGVTVNGGIPQKISLQDHLDKAKKDITFYMPVDNLGMAVIDWEEWRPTWARNWKPKDVYKNRSIELVQQQNVQLSLTEATEKAKQEFEKAGKDFLVETIKLGKLLRPNHLWGYYLFPDCYNHHYKKPGYNGSCFNVEIKRNDDLSWLWNESTALYPSIYLNTQQSPVAATLYVRNRVREAIRVSKIPDAKSPLPVFAYTRIVFTDQVLKFLSQDELVYTFGETVALGASGIVIWGTLSIMRSMKSCLLLDNYMETILNPYIINVTLAAKMCSQVLCQEQGVCIRKNWNSSDYLHLNPDNFAIQLEKGGKFTVRGKPTLEDLEQFSEKFYCSCYSTLSCKEKADVKDTDAVDVCIADGVCIDAFLKPPMETEE

SEQ ID NO: 487 - protein, 432 aa, Homo sapiens
  REGION 1..432: note = mature soluble human PH20, amino acid residues36-467
LNFRAPPVIPNVPFLWAWNAPSEFCLGKFDEPLDMSLFSFIGSPRINATGQGVTIFYVDRLGYYPYIDSITGVTVNGGIPQKISLQDHLDKAKKDITFYMPVDNLGMAVIDWEEWRPTWARNWKPKDVYKNRSIELVQQQNVQLSLTEATEKAKQEFEKAGKDFLVETIKLGKLLRPNHLWGYYLFPDCYNHHYKKPGYNGSCFNVEIKRNDDLSWLWNESTALYPSIYLNTQQSPVAATLYVRNRVREAIRVSKIPDAKSPLPVFAYTRIVFTDQVLKFLSQDELVYTFGETVALGASGIVIWGTLSIMRSMKSCLLLDNYMETILNPYIINVTLAAKMCSQVLCQEQGVCIRKNWNSSDYLHLNPDNFAIQLEKGGKFTVRGKPTLEDLEQFSEKFYCSCYSTLSCKEKADVKDTDAVDVCIADGVCIDA

SEQ ID NO: 488 - protein, 448 aa, Homo sapiens
  REGION 1..448: note = mature soluble human PH20, amino acid residues36-483
LNFRAPPVIPNVPFLWAWNAPSEFCLGKFDEPLDMSLFSFIGSPRINATGQGVTIFYVDRLGYYPYIDSITGVTVNGGIPQKISLQDHLDKAKKDITFYMPVDNLGMAVIDWEEWRPTWARNWKPKDVYKNRSIELVQQQNVQLSLTEATEKAKQEFEKAGKDFLVETIKLGKLLRPNHLWGYYLFPDCYNHHYKKPGYNGSCFNVEIKRNDDLSWLWNESTALYPSIYLNTQQSPVAATLYVRNRVREAIRVSKIPDAKSPLPVFAYTRIVFTDQVLKFLSQDELVYTFGETVALGASGIVIWGTLSIMRSMKSCLLLDNYMETILNPYIINVTLAAKMCSQVLCQEQGVCIRKNWNSSDYLHLNPDNFAIQLEKGGKFTVRGKPTLEDLEQFSEKFYCSCYSTLSCKEKADVKDTDAVDVCIADGVCIDAFLKPPMETEEPQIFYN

SEQ ID NO: 489 - protein, 472 aa, Homo sapiens
  REGION 1..472: note = mature soluble human PH20, amino acid residues36-507
LNFRAPPVIPNVPFLWAWNAPSEFCLGKFDEPLDMSLFSFIGSPRINATGQGVTIFYVDRLGYYPYIDSITGVTVNGGIPQKISLQDHLDKAKKDITFYMPVDNLGMAVIDWEEWRPTWARNWKPKDVYKNRSIELVQQQNVQLSLTEATEKAKQEFEKAGKDFLVETIKLGKLLRPNHLWGYYLFPDCYNHHYKKPGYNGSCFNVEIKRNDDLSWLWNESTALYPSIYLNTQQSPVAATLYVRNRVREAIRVSKIPDAKSPLPVFAYTRIVFTDQVLKFLSQDELVYTFGETVALGASGIVIWGTLSIMRSMKSCLLLDNYMETILNPYIINVTLAAKMCSQVLCQEQGVCIRKNWNSSDYLHLNPDNFAIQLEKGGKFTVRGKPTLEDLEQFSEKFYCSCYSTLSCKEKADVKDTDAVDVCIADGVCIDAFLKPPMETEEPQIFYNASPSTLSATMFIVSILFLIISSVA

SEQ ID NO: 490 - protein, 470 aa, Homo sapiens
  REGION 1..470: note = mature soluble human PH20, amino acid residues36-505
LNFRAPPVIPNVPFLWAWNAPSEFCLGKFDEPLDMSLFSFIGSPRINATGQGVTIFYVDRLGYYPYIDSITGVTVNGGIPQKISLQDHLDKAKKDITFYMPVDNLGMAVIDWEEWRPTWARNWKPKDVYKNRSIELVQQQNVQLSLTEATEKAKQEFEKAGKDFLVETIKLGKLLRPNHLWGYYLFPDCYNHHYKKPGYNGSCFNVEIKRNDDLSWLWNESTALYPSIYLNTQQSPVAATLYVRNRVREAIRVSKIPDAKSPLPVFAYTRIVFTDQVLKFLSQDELVYTFGETVALGASGIVIWGTLSIMRSMKSCLLLDNYMETILNPYIINVTLAAKMCSQVLCQEQGVCIRKNWNSSDYLHLNPDNFAIQLEKGGKFTVRGKPTLEDLEQFSEKFYCSCYSTLSCKEKADVKDTDAVDVCIADGVCIDAFLKPPMETEEPQIFYNASPSTLSATMFIVSILFLIISS

SEQ ID NO: 491 - protein, 468 aa, Homo sapiens
  REGION 1..468: note = mature soluble human PH20, amino acid residues36-503
LNFRAPPVIPNVPFLWAWNAPSEFCLGKFDEPLDMSLFSFIGSPRINATGQGVTIFYVDRLGYYPYIDSITGVTVNGGIPQKISLQDHLDKAKKDITFYMPVDNLGMAVIDWEEWRPTWARNWKPKDVYKNRSIELVQQQNVQLSLTEATEKAKQEFEKAGKDFLVETIKLGKLLRPNHLWGYYLFPDCYNHHYKKPGYNGSCFNVEIKRNDDLSWLWNESTALYPSIYLNTQQSPVAATLYVRNRVREAIRVSKIPDAKSPLPVFAYTRIVFTDQVLKFLSQDELVYTFGETVALGASGIVIWGTLSIMRSMKSCLLLDNYMETILNPYIINVTLAAKMCSQVLCQEQGVCIRKNWNSSDYLHLNPDNFAIQLEKGGKFTVRGKPTLEDLEQFSEKFYCSCYSTLSCKEKADVKDTDAVDVCIADGVCIDAFLKPPMETEEPQIFYNASPSTLSATMFIVSILFLII

SEQ ID NO: 492 - protein, 466 aa, Homo sapiens
  REGION 1..466: note = mature soluble human PH20, amino acid residues36-501
LNFRAPPVIPNVPFLWAWNAPSEFCLGKFDEPLDMSLFSFIGSPRINATGQGVTIFYVDRLGYYPYIDSITGVTVNGGIPQKISLQDHLDKAKKDITFYMPVDNLGMAVIDWEEWRPTWARNWKPKDVYKNRSIELVQQQNVQLSLTEATEKAKQEFEKAGKDFLVETIKLGKLLRPNHLWGYYLFPDCYNHHYKKPGYNGSCFNVEIKRNDDLSWLWNESTALYPSIYLNTQQSPVAATLYVRNRVREAIRVSKIPDAKSPLPVFAYTRIVFTDQVLKFLSQDELVYTFGETVALGASGIVIWGTLSIMRSMKSCLLLDNYMETILNPYIINVTLAAKMCSQVLCQEQGVCIRKNWNSSDYLHLNPDNFAIQLEKGGKFTVRGKPTLEDLEQFSEKFYCSCYSTLSCKEKADVKDTDAVDVCIADGVCIDAFLKPPMETEEPQIFYNASPSTLSATMFIVSILFL

SEQ ID NO: 493 - protein, 464 aa, Homo sapiens
  REGION 1..464: note = mature soluble human PH20, amino acid residues36-499
LNFRAPPVIPNVPFLWAWNAPSEFCLGKFDEPLDMSLFSFIGSPRINATGQGVTIFYVDRLGYYPYIDSITGVTVNGGIPQKISLQDHLDKAKKDITFYMPVDNLGMAVIDWEEWRPTWARNWKPKDVYKNRSIELVQQQNVQLSLTEATEKAKQEFEKAGKDFLVETIKLGKLLRPNHLWGYYLFPDCYNHHYKKPGYNGSCFNVEIKRNDDLSWLWNESTALYPSIYLNTQQSPVAATLYVRNRVREAIRVSKIPDAKSPLPVFAYTRIVFTDQVLKFLSQDELVYTFGETVALGASGIVIWGTLSIMRSMKSCLLLDNYMETILNPYIINVTLAAKMCSQVLCQEQGVCIRKNWNSSDYLHLNPDNFAIQLEKGGKFTVRGKPTLEDLEQFSEKFYCSCYSTLSCKEKADVKDTDAVDVCIADGVCIDAFLKPPMETEEPQIFYNASPSTLSATMFIVSIL

SEQ ID NO: 494 - protein, 462 aa, Homo sapiens
  REGION 1..462: note = mature soluble human PH20, amino acid residues36-497
LNFRAPPVIPNVPFLWAWNAPSEFCLGKFDEPLDMSLFSFIGSPRINATGQGVTIFYVDRLGYYPYIDSITGVTVNGGIPQKISLQDHLDKAKKDITFYMPVDNLGMAVIDWEEWRPTWARNWKPKDVYKNRSIELVQQQNVQLSLTEATEKAKQEFEKAGKDFLVETIKLGKLLRPNHLWGYYLFPDCYNHHYKKPGYNGSCFNVEIKRNDDLSWLWNESTALYPSIYLNTQQSPVAATLYVRNRVREAIRVSKIPDAKSPLPVFAYTRIVFTDQVLKFLSQDELVYTFGETVALGASGIVIWGTLSIMRSMKSCLLLDNYMETILNPYIINVTLAAKMCSQVLCQEQGVCIRKNWNSSDYLHLNPDNFAIQLEKGGKFTVRGKPTLEDLEQFSEKFYCSCYSTLSCKEKADVKDTDAVDVCIADGVCIDAFLKPPMETEEPQIFYNASPSTLSATMFIVS

SEQ ID NO: 495 - protein, 460 aa, Homo sapiens
  REGION 1..460: note = mature soluble human PH20, amino acid residues36-495
LNFRAPPVIPNVPFLWAWNAPSEFCLGKFDEPLDMSLFSFIGSPRINATGQGVTIFYVDRLGYYPYIDSITGVTVNGGIPQKISLQDHLDKAKKDITFYMPVDNLGMAVIDWEEWRPTWARNWKPKDVYKNRSIELVQQQNVQLSLTEATEKAKQEFEKAGKDFLVETIKLGKLLRPNHLWGYYLFPDCYNHHYKKPGYNGSCFNVEIKRNDDLSWLWNESTALYPSIYLNTQQSPVAATLYVRNRVREAIRVSKIPDAKSPLPVFAYTRIVFTDQVLKFLSQDELVYTFGETVALGASGIVIWGTLSIMRSMKSCLLLDNYMETILNPYIINVTLAAKMCSQVLCQEQGVCIRKNWNSSDYLHLNPDNFAIQLEKGGKFTVRGKPTLEDLEQFSEKFYCSCYSTLSCKEKADVKDTDAVDVCIADGVCIDAFLKPPMETEEPQIFYNASPSTLSATMFI

SEQ ID NO: 496 - protein, 458 aa, Homo sapiens
  REGION 1..458: note = mature soluble human PH20, amino acid residues36-493
LNFRAPPVIPNVPFLWAWNAPSEFCLGKFDEPLDMSLFSFIGSPRINATGQGVTIFYVDRLGYYPYIDSITGVTVNGGIPQKISLQDHLDKAKKDITFYMPVDNLGMAVIDWEEWRPTWARNWKPKDVYKNRSIELVQQQNVQLSLTEATEKAKQEFEKAGKDFLVETIKLGKLLRPNHLWGYYLFPDCYNHHYKKPGYNGSCFNVEIKRNDDLSWLWNESTALYPSIYLNTQQSPVAATLYVRNRVREAIRVSKIPDAKSPLPVFAYTRIVFTDQVLKFLSQDELVYTFGETVALGASGIVIWGTLSIMRSMKSCLLLDNYMETILNPYIINVTLAAKMCSQVLCQEQGVCIRKNWNSSDYLHLNPDNFAIQLEKGGKFTVRGKPTLEDLEQFSEKFYCSCYSTLSCKEKADVKDTDAVDVCIADGVCIDAFLKPPMETEEPQIFYNASPSTLSATM

SEQ ID NO: 497 - protein, 456 aa, Homo sapiens
  REGION 1..456: note = mature soluble human PH20, amino acid residues36-491
LNFRAPPVIPNVPFLWAWNAPSEFCLGKFDEPLDMSLFSFIGSPRINATGQGVTIFYVDRLGYYPYIDSITGVTVNGGIPQKISLQDHLDKAKKDITFYMPVDNLGMAVIDWEEWRPTWARNWKPKDVYKNRSIELVQQQNVQLSLTEATEKAKQEFEKAGKDFLVETIKLGKLLRPNHLWGYYLFPDCYNHHYKKPGYNGSCFNVEIKRNDDLSWLWNESTALYPSIYLNTQQSPVAATLYVRNRVREAIRVSKIPDAKSPLPVFAYTRIVFTDQVLKFLSQDELVYTFGETVALGASGIVIWGTLSIMRSMKSCLLLDNYMETILNPYIINVTLAAKMCSQVLCQEQGVCIRKNWNSSDYLHLNPDNFAIQLEKGGKFTVRGKPTLEDLEQFSEKFYCSCYSTLSCKEKADVKDTDAVDVCIADGVCIDAFLKPPMETEEPQIFYNASPSTLSA

SEQ ID NO: 498 - protein, 454 aa, Homo sapiens
  REGION 1..454: note = mature soluble human PH20, amino acid residues36-489
LNFRAPPVIPNVPFLWAWNAPSEFCLGKFDEPLDMSLFSFIGSPRINATGQGVTIFYVDRLGYYPYIDSITGVTVNGGIPQKISLQDHLDKAKKDITFYMPVDNLGMAVIDWEEWRPTWARNWKPKDVYKNRSIELVQQQNVQLSLTEATEKAKQEFEKAGKDFLVETIKLGKLLRPNHLWGYYLFPDCYNHHYKKPGYNGSCFNVEIKRNDDLSWLWNESTALYPSIYLNTQQSPVAATLYVRNRVREAIRVSKIPDAKSPLPVFAYTRIVFTDQVLKFLSQDELVYTFGETVALGASGIVIWGTLSIMRSMKSCLLLDNYMETILNPYIINVTLAAKMCSQVLCQEQGVCIRKNWNSSDYLHLNPDNFAIQLEKGGKFTVRGKPTLEDLEQFSEKFYCSCYSTLSCKEKADVKDTDAVDVCIADGVCIDAFLKPPMETEEPQIFYNASPSTL

SEQ ID NO: 499 - protein, 455 aa, Homo sapiens
  REGION 1..455: note = mature soluble human PH20, amino acid residues36-490
LNFRAPPVIPNVPFLWAWNAPSEFCLGKFDEPLDMSLFSFIGSPRINATGQGVTIFYVDRLGYYPYIDSITGVTVNGGIPQKISLQDHLDKAKKDITFYMPVDNLGMAVIDWEEWRPTWARNWKPKDVYKNRSIELVQQQNVQLSLTEATEKAKQEFEKAGKDFLVETIKLGKLLRPNHLWGYYLFPDCYNHHYKKPGYNGSCFNVEIKRNDDLSWLWNESTALYPSIYLNTQQSPVAATLYVRNRVREAIRVSKIPDAKSPLPVFAYTRIVFTDQVLKFLSQDELVYTFGETVALGASGIVIWGTLSIMRSMKSCLLLDNYMETILNPYIINVTLAAKMCSQVLCQEQGVCIRKNWNSSDYLHLNPDNFAIQLEKGGKFTVRGKPTLEDLEQFSEKFYCSCYSTLSCKEKADVKDTDAVDVCIADGVCIDAFLKPPMETEEPQIFYNASPSTLS

SEQ ID NO: 500 - protein, 452 aa, Homo sapiens
  REGION 1..452: note = mature soluble human PH20, amino acid residues36-487
LNFRAPPVIPNVPFLWAWNAPSEFCLGKFDEPLDMSLFSFIGSPRINATGQGVTIFYVDRLGYYPYIDSITGVTVNGGIPQKISLQDHLDKAKKDITFYMPVDNLGMAVIDWEEWRPTWARNWKPKDVYKNRSIELVQQQNVQLSLTEATEKAKQEFEKAGKDFLVETIKLGKLLRPNHLWGYYLFPDCYNHHYKKPGYNGSCFNVEIKRNDDLSWLWNESTALYPSIYLNTQQSPVAATLYVRNRVREAIRVSKIPDAKSPLPVFAYTRIVFTDQVLKFLSQDELVYTFGETVALGASGIVIWGTLSIMRSMKSCLLLDNYMETILNPYIINVTLAAKMCSQVLCQEQGVCIRKNWNSSDYLHLNPDNFAIQLEKGGKFTVRGKPTLEDLEQFSEKFYCSCYSTLSCKEKADVKDTDAVDVCIADGVCIDAFLKPPMETEEPQIFYNASPS

SEQ ID NO: 501 - protein, 450 aa, Homo sapiens
  REGION 1..450: note = mature soluble human PH20, amino acid residues36-485
LNFRAPPVIPNVPFLWAWNAPSEFCLGKFDEPLDMSLFSFIGSPRINATGQGVTIFYVDRLGYYPYIDSITGVTVNGGIPQKISLQDHLDKAKKDITFYMPVDNLGMAVIDWEEWRPTWARNWKPKDVYKNRSIELVQQQNVQLSLTEATEKAKQEFEKAGKDFLVETIKLGKLLRPNHLWGYYLFPDCYNHHYKKPGYNGSCFNVEIKRNDDLSWLWNESTALYPSIYLNTQQSPVAATLYVRNRVREAIRVSKIPDAKSPLPVFAYTRIVFTDQVLKFLSQDELVYTFGETVALGASGIVIWGTLSIMRSMKSCLLLDNYMETILNPYIINVTLAAKMCSQVLCQEQGVCIRKNWNSSDYLHLNPDNFAIQLEKGGKFTVRGKPTLEDLEQFSEKFYCSCYSTLSCKEKADVKDTDAVDVCIADGVCIDAFLKPPMETEEPQIFYNAS

SEQ ID NO: 502 - protein, 449 aa, Homo sapiens
  REGION 1..449: note = mature soluble human PH20, amino acid residues36-484
LNFRAPPVIPNVPFLWAWNAPSEFCLGKFDEPLDMSLFSFIGSPRINATGQGVTIFYVDRLGYYPYIDSITGVTVNGGIPQKISLQDHLDKAKKDITFYMPVDNLGMAVIDWEEWRPTWARNWKPKDVYKNRSIELVQQQNVQLSLTEATEKAKQEFEKAGKDFLVETIKLGKLLRPNHLWGYYLFPDCYNHHYKKPGYNGSCFNVEIKRNDDLSWLWNESTALYPSIYLNTQQSPVAATLYVRNRVREAIRVSKIPDAKSPLPVFAYTRIVFTDQVLKFLSQDELVYTFGETVALGASGIVIWGTLSIMRSMKSCLLLDNYMETILNPYIINVTLAAKMCSQVLCQEQGVCIRKNWNSSDYLHLNPDNFAIQLEKGGKFTVRGKPTLEDLEQFSEKFYCSCYSTLSCKEKADVKDTDAVDVCIADGVCIDAFLKPPMETEEPQIFYNA

SEQ ID NO: 503 - protein, 441 aa, Homo sapiens
  REGION 1..441: note = mature soluble human PH20, amino acid residues36-476
LNFRAPPVIPNVPFLWAWNAPSEFCLGKFDEPLDMSLFSFIGSPRINATGQGVTIFYVDRLGYYPYIDSITGVTVNGGIPQKISLQDHLDKAKKDITFYMPVDNLGMAVIDWEEWRPTWARNWKPKDVYKNRSIELVQQQNVQLSLTEATEKAKQEFEKAGKDFLVETIKLGKLLRPNHLWGYYLFPDCYNHHYKKPGYNGSCFNVEIKRNDDLSWLWNESTALYPSIYLNTQQSPVAATLYVRNRVREAIRVSKIPDAKSPLPVFAYTRIVFTDQVLKFLSQDELVYTFGETVALGASGIVIWGTLSIMRSMKSCLLLDNYMETILNPYIINVTLAAKMCSQVLCQEQGVCIRKNWNSSDYLHLNPDNFAIQLEKGGKFTVRGKPTLEDLEQFSEKFYCSCYSTLSCKEKADVKDTDAVDVCIADGVCIDAFLKPPMETE

SEQ ID NO: 504 - protein, 440 aa, Homo sapiens
  REGION 1..440: note = mature soluble human PH20, amino acid residues36-475
LNFRAPPVIPNVPFLWAWNAPSEFCLGKFDEPLDMSLFSFIGSPRINATGQGVTIFYVDRLGYYPYIDSITGVTVNGGIPQKISLQDHLDKAKKDITFYMPVDNLGMAVIDWEEWRPTWARNWKPKDVYKNRSIELVQQQNVQLSLTEATEKAKQEFEKAGKDFLVETIKLGKLLRPNHLWGYYLFPDCYNHHYKKPGYNGSCFNVEIKRNDDLSWLWNESTALYPSIYLNTQQSPVAATLYVRNRVREAIRVSKIPDAKSPLPVFAYTRIVFTDQVLKFLSQDELVYTFGETVALGASGIVIWGTLSIMRSMKSCLLLDNYMETILNPYIINVTLAAKMCSQVLCQEQGVCIRKNWNSSDYLHLNPDNFAIQLEKGGKFTVRGKPTLEDLEQFSEKFYCSCYSTLSCKEKADVKDTDAVDVCIADGVCIDAFLKPPMET

SEQ ID NO: 505 - protein, 439 aa, Homo sapiens
  REGION 1..439: note = mature soluble human PH20, amino acid residues36-474
LNFRAPPVIPNVPFLWAWNAPSEFCLGKFDEPLDMSLFSFIGSPRINATGQGVTIFYVDRLGYYPYIDSITGVTVNGGIPQKISLQDHLDKAKKDITFYMPVDNLGMAVIDWEEWRPTWARNWKPKDVYKNRSIELVQQQNVQLSLTEATEKAKQEFEKAGKDFLVETIKLGKLLRPNHLWGYYLFPDCYNHHYKKPGYNGSCFNVEIKRNDDLSWLWNESTALYPSIYLNTQQSPVAATLYVRNRVREAIRVSKIPDAKSPLPVFAYTRIVFTDQVLKFLSQDELVYTFGETVALGASGIVIWGTLSIMRSMKSCLLLDNYMETILNPYIINVTLAAKMCSQVLCQEQGVCIRKNWNSSDYLHLNPDNFAIQLEKGGKFTVRGKPTLEDLEQFSEKFYCSCYSTLSCKEKADVKDTDAVDVCIADGVCIDAFLKPPME

SEQ ID NO: 506 - protein, 438 aa, Homo sapiens
  REGION 1..438: note = mature soluble human PH20, amino acid residues36-473
LNFRAPPVIPNVPFLWAWNAPSEFCLGKFDEPLDMSLFSFIGSPRINATGQGVTIFYVDRLGYYPYIDSITGVTVNGGIPQKISLQDHLDKAKKDITFYMPVDNLGMAVIDWEEWRPTWARNWKPKDVYKNRSIELVQQQNVQLSLTEATEKAKQEFEKAGKDFLVETIKLGKLLRPNHLWGYYLFPDCYNHHYKKPGYNGSCFNVEIKRNDDLSWLWNESTALYPSIYLNTQQSPVAATLYVRNRVREAIRVSKIPDAKSPLPVFAYTRIVFTDQVLKFLSQDELVYTFGETVALGASGIVIWGTLSIMRSMKSCLLLDNYMETILNPYIINVTLAAKMCSQVLCQEQGVCIRKNWNSSDYLHLNPDNFAIQLEKGGKFTVRGKPTLEDLEQFSEKFYCSCYSTLSCKEKADVKDTDAVDVCIADGVCIDAFLKPPM

SEQ ID NO: 507 - protein, 437 aa, Homo sapiens
  REGION 1..437: note = mature soluble human PH20, amino acid residues36-472
LNFRAPPVIPNVPFLWAWNAPSEFCLGKFDEPLDMSLFSFIGSPRINATGQGVTIFYVDRLGYYPYIDSITGVTVNGGIPQKISLQDHLDKAKKDITFYMPVDNLGMAVIDWEEWRPTWARNWKPKDVYKNRSIELVQQQNVQLSLTEATEKAKQEFEKAGKDFLVETIKLGKLLRPNHLWGYYLFPDCYNHHYKKPGYNGSCFNVEIKRNDDLSWLWNESTALYPSIYLNTQQSPVAATLYVRNRVREAIRVSKIPDAKSPLPVFAYTRIVFTDQVLKFLSQDELVYTFGETVALGASGIVIWGTLSIMRSMKSCLLLDNYMETILNPYIINVTLAAKMCSQVLCQEQGVCIRKNWNSSDYLHLNPDNFAIQLEKGGKFTVRGKPTLEDLEQFSEKFYCSCYSTLSCKEKADVKDTDAVDVCIADGVCIDAFLKPP

SEQ ID NO: 508 - protein, 436 aa, Homo sapiens
  REGION 1..436: note = mature soluble human PH20, amino acid residues36-471
LNFRAPPVIPNVPFLWAWNAPSEFCLGKFDEPLDMSLFSFIGSPRINATGQGVTIFYVDRLGYYPYIDSITGVTVNGGIPQKISLQDHLDKAKKDITFYMPVDNLGMAVIDWEEWRPTWARNWKPKDVYKNRSIELVQQQNVQLSLTEATEKAKQEFEKAGKDFLVETIKLGKLLRPNHLWGYYLFPDCYNHHYKKPGYNGSCFNVEIKRNDDLSWLWNESTALYPSIYLNTQQSPVAATLYVRNRVREAIRVSKIPDAKSPLPVFAYTRIVFTDQVLKFLSQDELVYTFGETVALGASGIVIWGTLSIMRSMKSCLLLDNYMETILNPYIINVTLAAKMCSQVLCQEQGVCIRKNWNSSDYLHLNPDNFAIQLEKGGKFTVRGKPTLEDLEQFSEKFYCSCYSTLSCKEKADVKDTDAVDVCIADGVCIDAFLKP

SEQ ID NO: 509 - protein, 435 aa, Homo sapiens
  REGION 1..435: note = mature soluble human PH20, amino acid residues36-470
LNFRAPPVIPNVPFLWAWNAPSEFCLGKFDEPLDMSLFSFIGSPRINATGQGVTIFYVDRLGYYPYIDSITGVTVNGGIPQKISLQDHLDKAKKDITFYMPVDNLGMAVIDWEEWRPTWARNWKPKDVYKNRSIELVQQQNVQLSLTEATEKAKQEFEKAGKDFLVETIKLGKLLRPNHLWGYYLFPDCYNHHYKKPGYNGSCFNVEIKRNDDLSWLWNESTALYPSIYLNTQQSPVAATLYVRNRVREAIRVSKIPDAKSPLPVFAYTRIVFTDQVLKFLSQDELVYTFGETVALGASGIVIWGTLSIMRSMKSCLLLDNYMETILNPYIINVTLAAKMCSQVLCQEQGVCIRKNWNSSDYLHLNPDNFAIQLEKGGKFTVRGKPTLEDLEQFSEKFYCSCYSTLSCKEKADVKDTDAVDVCIADGVCIDAFLK

SEQ ID NO: 510 - protein, 434 aa, Homo sapiens
  REGION 1..434: note = mature soluble human PH20, amino acid residues36-469
LNFRAPPVIPNVPFLWAWNAPSEFCLGKFDEPLDMSLFSFIGSPRINATGQGVTIFYVDRLGYYPYIDSITGVTVNGGIPQKISLQDHLDKAKKDITFYMPVDNLGMAVIDWEEWRPTWARNWKPKDVYKNRSIELVQQQNVQLSLTEATEKAKQEFEKAGKDFLVETIKLGKLLRPNHLWGYYLFPDCYNHHYKKPGYNGSCFNVEIKRNDDLSWLWNESTALYPSIYLNTQQSPVAATLYVRNRVREAIRVSKIPDAKSPLPVFAYTRIVFTDQVLKFLSQDELVYTFGETVALGASGIVIWGTLSIMRSMKSCLLLDNYMETILNPYIINVTLAAKMCSQVLCQEQGVCIRKNWNSSDYLHLNPDNFAIQLEKGGKFTVRGKPTLEDLEQFSEKFYCSCYSTLSCKEKADVKDTDAVDVCIADGVCIDAFL

SEQ ID NO: 511 - protein, 433 aa, Homo sapiens
  REGION 1..433: note = mature soluble human PH20, amino acid residues36-468
LNFRAPPVIPNVPFLWAWNAPSEFCLGKFDEPLDMSLFSFIGSPRINATGQGVTIFYVDRLGYYPYIDSITGVTVNGGIPQKISLQDHLDKAKKDITFYMPVDNLGMAVIDWEEWRPTWARNWKPKDVYKNRSIELVQQQNVQLSLTEATEKAKQEFEKAGKDFLVETIKLGKLLRPNHLWGYYLFPDCYNHHYKKPGYNGSCFNVEIKRNDDLSWLWNESTALYPSIYLNTQQSPVAATLYVRNRVREAIRVSKIPDAKSPLPVFAYTRIVFTDQVLKFLSQDELVYTFGETVALGASGIVIWGTLSIMRSMKSCLLLDNYMETILNPYIINVTLAAKMCSQVLCQEQGVCIRKNWNSSDYLHLNPDNFAIQLEKGGKFTVRGKPTLEDLEQFSEKFYCSCYSTLSCKEKADVKDTDAVDVCIADGVCIDAF

SEQ ID NO: 512 - protein, 431 aa, Homo sapiens
  REGION 1..431: note = mature soluble human PH20, amino acid residues36-466
LNFRAPPVIPNVPFLWAWNAPSEFCLGKFDEPLDMSLFSFIGSPRINATGQGVTIFYVDRLGYYPYIDSITGVTVNGGIPQKISLQDHLDKAKKDITFYMPVDNLGMAVIDWEEWRPTWARNWKPKDVYKNRSIELVQQQNVQLSLTEATEKAKQEFEKAGKDFLVETIKLGKLLRPNHLWGYYLFPDCYNHHYKKPGYNGSCFNVEIKRNDDLSWLWNESTALYPSIYLNTQQSPVAATLYVRNRVREAIRVSKIPDAKSPLPVFAYTRIVFTDQVLKFLSQDELVYTFGETVALGASGIVIWGTLSIMRSMKSCLLLDNYMETILNPYIINVTLAAKMCSQVLCQEQGVCIRKNWNSSDYLHLNPDNFAIQLEKGGKFTVRGKPTLEDLEQFSEKFYCSCYSTLSCKEKADVKDTDAVDVCIADGVCID

SEQ ID NO: 513 - protein, 430 aa, Homo sapiens
  REGION 1..430: note = mature soluble human PH20, amino acid residues36-465
LNFRAPPVIPNVPFLWAWNAPSEFCLGKFDEPLDMSLFSFIGSPRINATGQGVTIFYVDRLGYYPYIDSITGVTVNGGIPQKISLQDHLDKAKKDITFYMPVDNLGMAVIDWEEWRPTWARNWKPKDVYKNRSIELVQQQNVQLSLTEATEKAKQEFEKAGKDFLVETIKLGKLLRPNHLWGYYLFPDCYNHHYKKPGYNGSCFNVEIKRNDDLSWLWNESTALYPSIYLNTQQSPVAATLYVRNRVREAIRVSKIPDAKSPLPVFAYTRIVFTDQVLKFLSQDELVYTFGETVALGASGIVIWGTLSIMRSMKSCLLLDNYMETILNPYIINVTLAAKMCSQVLCQEQGVCIRKNWNSSDYLHLNPDNFAIQLEKGGKFTVRGKPTLEDLEQFSEKFYCSCYSTLSCKEKADVKDTDAVDVCIADGVCI

SEQ ID NO: 514 - protein, 429 aa, Homo sapiens
  REGION 1..429: note = mature soluble human PH20, amino acid residues36-464
LNFRAPPVIPNVPFLWAWNAPSEFCLGKFDEPLDMSLFSFIGSPRINATGQGVTIFYVDRLGYYPYIDSITGVTVNGGIPQKISLQDHLDKAKKDITFYMPVDNLGMAVIDWEEWRPTWARNWKPKDVYKNRSIELVQQQNVQLSLTEATEKAKQEFEKAGKDFLVETIKLGKLLRPNHLWGYYLFPDCYNHHYKKPGYNGSCFNVEIKRNDDLSWLWNESTALYPSIYLNTQQSPVAATLYVRNRVREAIRVSKIPDAKSPLPVFAYTRIVFTDQVLKFLSQDELVYTFGETVALGASGIVIWGTLSIMRSMKSCLLLDNYMETILNPYIINVTLAAKMCSQVLCQEQGVCIRKNWNSSDYLHLNPDNFAIQLEKGGKFTVRGKPTLEDLEQFSEKFYCSCYSTLSCKEKADVKDTDAVDVCIADGVC

SEQ ID NO: 515 - protein, 427 aa, Homo sapiens
  REGION 1..427: note = mature soluble human PH20, amino acid residues36-462
LNFRAPPVIPNVPFLWAWNAPSEFCLGKFDEPLDMSLFSFIGSPRINATGQGVTIFYVDRLGYYPYIDSITGVTVNGGIPQKISLQDHLDKAKKDITFYMPVDNLGMAVIDWEEWRPTWARNWKPKDVYKNRSIELVQQQNVQLSLTEATEKAKQEFEKAGKDFLVETIKLGKLLRPNHLWGYYLFPDCYNHHYKKPGYNGSCFNVEIKRNDDLSWLWNESTALYPSIYLNTQQSPVAATLYVRNRVREAIRVSKIPDAKSPLPVFAYTRIVFTDQVLKFLSQDELVYTFGETVALGASGIVIWGTLSIMRSMKSCLLLDNYMETILNPYIINVTLAAKMCSQVLCQEQGVCIRKNWNSSDYLHLNPDNFAIQLEKGGKFTVRGKPTLEDLEQFSEKFYCSCYSTLSCKEKADVKDTDAVDVCIADG

SEQ ID NO: 516 - protein, 425 aa, Homo sapiens
  REGION 1..425: note = mature soluble human PH20, amino acid residues36-460
LNFRAPPVIPNVPFLWAWNAPSEFCLGKFDEPLDMSLFSFIGSPRINATGQGVTIFYVDRLGYYPYIDSITGVTVNGGIPQKISLQDHLDKAKKDITFYMPVDNLGMAVIDWEEWRPTWARNWKPKDVYKNRSIELVQQQNVQLSLTEATEKAKQEFEKAGKDFLVETIKLGKLLRPNHLWGYYLFPDCYNHHYKKPGYNGSCFNVEIKRNDDLSWLWNESTALYPSIYLNTQQSPVAATLYVRNRVREAIRVSKIPDAKSPLPVFAYTRIVFTDQVLKFLSQDELVYTFGETVALGASGIVIWGTLSIMRSMKSCLLLDNYMETILNPYIINVTLAAKMCSQVLCQEQGVCIRKNWNSSDYLHLNPDNFAIQLEKGGKFTVRGKPTLEDLEQFSEKFYCSCYSTLSCKEKADVKDTDAVDVCIA

SEQ ID NO: 517 - protein, 423 aa, Homo sapiens
  REGION 1..423: note = mature soluble human PH20, amino acid residues36-458
LNFRAPPVIPNVPFLWAWNAPSEFCLGKFDEPLDMSLFSFIGSPRINATGQGVTIFYVDRLGYYPYIDSITGVTVNGGIPQKISLQDHLDKAKKDITFYMPVDNLGMAVIDWEEWRPTWARNWKPKDVYKNRSIELVQQQNVQLSLTEATEKAKQEFEKAGKDFLVETIKLGKLLRPNHLWGYYLFPDCYNHHYKKPGYNGSCFNVEIKRNDDLSWLWNESTALYPSIYLNTQQSPVAATLYVRNRVREAIRVSKIPDAKSPLPVFAYTRIVFTDQVLKFLSQDELVYTFGETVALGASGIVIWGTLSIMRSMKSCLLLDNYMETILNPYIINVTLAAKMCSQVLCQEQGVCIRKNWNSSDYLHLNPDNFAIQLEKGGKFTVRGKPTLEDLEQFSEKFYCSCYSTLSCKEKADVKDTDAVDVC

SEQ ID NO: 518 - protein, 421 aa, Homo sapiens
  REGION 1..421: note = mature soluble human PH20, amino acid residues36-456
LNFRAPPVIPNVPFLWAWNAPSEFCLGKFDEPLDMSLFSFIGSPRINATGQGVTIFYVDRLGYYPYIDSITGVTVNGGIPQKISLQDHLDKAKKDITFYMPVDNLGMAVIDWEEWRPTWARNWKPKDVYKNRSIELVQQQNVQLSLTEATEKAKQEFEKAGKDFLVETIKLGKLLRPNHLWGYYLFPDCYNHHYKKPGYNGSCFNVEIKRNDDLSWLWNESTALYPSIYLNTQQSPVAATLYVRNRVREAIRVSKIPDAKSPLPVFAYTRIVFTDQVLKFLSQDELVYTFGETVALGASGIVIWGTLSIMRSMKSCLLLDNYMETILNPYIINVTLAAKMCSQVLCQEQGVCIRKNWNSSDYLHLNPDNFAIQLEKGGKFTVRGKPTLEDLEQFSEKFYCSCYSTLSCKEKADVKDTDAVD

SEQ ID NO: 519 - protein, 419 aa, Homo sapiens
  REGION 1..419: note = mature soluble human PH20, amino acid residues36-454
LNFRAPPVIPNVPFLWAWNAPSEFCLGKFDEPLDMSLFSFIGSPRINATGQGVTIFYVDRLGYYPYIDSITGVTVNGGIPQKISLQDHLDKAKKDITFYMPVDNLGMAVIDWEEWRPTWARNWKPKDVYKNRSIELVQQQNVQLSLTEATEKAKQEFEKAGKDFLVETIKLGKLLRPNHLWGYYLFPDCYNHHYKKPGYNGSCFNVEIKRNDDLSWLWNESTALYPSIYLNTQQSPVAATLYVRNRVREAIRVSKIPDAKSPLPVFAYTRIVFTDQVLKFLSQDELVYTFGETVALGASGIVIWGTLSIMRSMKSCLLLDNYMETILNPYIINVTLAAKMCSQVLCQEQGVCIRKNWNSSDYLHLNPDNFAIQLEKGGKFTVRGKPTLEDLEQFSEKFYCSCYSTLSCKEKADVKDTDA

SEQ ID NO: 520 - protein, 417 aa, Homo sapiens
  REGION 1..417: note = mature soluble human PH20, amino acid residues36-452
LNFRAPPVIPNVPFLWAWNAPSEFCLGKFDEPLDMSLFSFIGSPRINATGQGVTIFYVDRLGYYPYIDSITGVTVNGGIPQKISLQDHLDKAKKDITFYMPVDNLGMAVIDWEEWRPTWARNWKPKDVYKNRSIELVQQQNVQLSLTEATEKAKQEFEKAGKDFLVETIKLGKLLRPNHLWGYYLFPDCYNHHYKKPGYNGSCFNVEIKRNDDLSWLWNESTALYPSIYLNTQQSPVAATLYVRNRVREAIRVSKIPDAKSPLPVFAYTRIVFTDQVLKFLSQDELVYTFGETVALGASGIVIWGTLSIMRSMKSCLLLDNYMETILNPYIINVTLAAKMCSQVLCQEQGVCIRKNWNSSDYLHLNPDNFAIQLEKGGKFTVRGKPTLEDLEQFSEKFYCSCYSTLSCKEKADVKDT

SEQ ID NO: 521 - protein, 415 aa, Homo sapiens
  REGION 1..415: note = mature soluble human PH20, amino acid residues36-450
LNFRAPPVIPNVPFLWAWNAPSEFCLGKFDEPLDMSLFSFIGSPRINATGQGVTIFYVDRLGYYPYIDSITGVTVNGGIPQKISLQDHLDKAKKDITFYMPVDNLGMAVIDWEEWRPTWARNWKPKDVYKNRSIELVQQQNVQLSLTEATEKAKQEFEKAGKDFLVETIKLGKLLRPNHLWGYYLFPDCYNHHYKKPGYNGSCFNVEIKRNDDLSWLWNESTALYPSIYLNTQQSPVAATLYVRNRVREAIRVSKIPDAKSPLPVFAYTRIVFTDQVLKFLSQDELVYTFGETVALGASGIVIWGTLSIMRSMKSCLLLDNYMETILNPYIINVTLAAKMCSQVLCQEQGVCIRKNWNSSDYLHLNPDNFAIQLEKGGKFTVRGKPTLEDLEQFSEKFYCSCYSTLSCKEKADVK

SEQ ID NO: 522 - protein, 473 aa, Homo sapiens
  REGION 1..473: note = mature soluble human PH20, amino acid residues36-508
LNFRAPPVIPNVPFLWAWNAPSEFCLGKFDEPLDMSLFSFIGSPRINATGQGVTIFYVDRLGYYPYIDSITGVTVNGGIPQKISLQDHLDKAKKDITFYMPVDNLGMAVIDWEEWRPTWARNWKPKDVYKNRSIELVQQQNVQLSLTEATEKAKQEFEKAGKDFLVETIKLGKLLRPNHLWGYYLFPDCYNHHYKKPGYNGSCFNVEIKRNDDLSWLWNESTALYPSIYLNTQQSPVAATLYVRNRVREAIRVSKIPDAKSPLPVFAYTRIVFTDQVLKFLSQDELVYTFGETVALGASGIVIWGTLSIMRSMKSCLLLDNYMETILNPYIINVTLAAKMCSQVLCQEQGVCIRKNWNSSDYLHLNPDNFAIQLEKGGKFTVRGKPTLEDLEQFSEKFYCSCYSTLSCKEKADVKDTDAVDVCIADGVCIDAFLKPPMETEEPQIFYNASPSTLSATMFIVSILFLIISSVAS

SEQ ID NO: 523 - protein, 471 aa, Homo sapiens
  REGION 1..471: note = mature soluble human PH20, amino acid residues36-506
LNFRAPPVIPNVPFLWAWNAPSEFCLGKFDEPLDMSLFSFIGSPRINATGQGVTIFYVDRLGYYPYIDSITGVTVNGGIPQKISLQDHLDKAKKDITFYMPVDNLGMAVIDWEEWRPTWARNWKPKDVYKNRSIELVQQQNVQLSLTEATEKAKQEFEKAGKDFLVETIKLGKLLRPNHLWGYYLFPDCYNHHYKKPGYNGSCFNVEIKRNDDLSWLWNESTALYPSIYLNTQQSPVAATLYVRNRVREAIRVSKIPDAKSPLPVFAYTRIVFTDQVLKFLSQDELVYTFGETVALGASGIVIWGTLSIMRSMKSCLLLDNYMETILNPYIINVTLAAKMCSQVLCQEQGVCIRKNWNSSDYLHLNPDNFAIQLEKGGKFTVRGKPTLEDLEQFSEKFYCSCYSTLSCKEKADVKDTDAVDVCIADGVCIDAFLKPPMETEEPQIFYNASPSTLSATMFIVSILFLIISSV

SEQ ID NO: 524 - protein, 469 aa, Homo sapiens
  REGION 1..469: note = mature soluble human PH20, amino acid residues36-504
LNFRAPPVIPNVPFLWAWNAPSEFCLGKFDEPLDMSLFSFIGSPRINATGQGVTIFYVDRLGYYPYIDSITGVTVNGGIPQKISLQDHLDKAKKDITFYMPVDNLGMAVIDWEEWRPTWARNWKPKDVYKNRSIELVQQQNVQLSLTEATEKAKQEFEKAGKDFLVETIKLGKLLRPNHLWGYYLFPDCYNHHYKKPGYNGSCFNVEIKRNDDLSWLWNESTALYPSIYLNTQQSPVAATLYVRNRVREAIRVSKIPDAKSPLPVFAYTRIVFTDQVLKFLSQDELVYTFGETVALGASGIVIWGTLSIMRSMKSCLLLDNYMETILNPYIINVTLAAKMCSQVLCQEQGVCIRKNWNSSDYLHLNPDNFAIQLEKGGKFTVRGKPTLEDLEQFSEKFYCSCYSTLSCKEKADVKDTDAVDVCIADGVCIDAFLKPPMETEEPQIFYNASPSTLSATMFIVSILFLIIS

SEQ ID NO: 525 - protein, 467 aa, Homo sapiens
  REGION 1..467: note = mature soluble human PH20, amino acid residues36-502
LNFRAPPVIPNVPFLWAWNAPSEFCLGKFDEPLDMSLFSFIGSPRINATGQGVTIFYVDRLGYYPYIDSITGVTVNGGIPQKISLQDHLDKAKKDITFYMPVDNLGMAVIDWEEWRPTWARNWKPKDVYKNRSIELVQQQNVQLSLTEATEKAKQEFEKAGKDFLVETIKLGKLLRPNHLWGYYLFPDCYNHHYKKPGYNGSCFNVEIKRNDDLSWLWNESTALYPSIYLNTQQSPVAATLYVRNRVREAIRVSKIPDAKSPLPVFAYTRIVFTDQVLKFLSQDELVYTFGETVALGASGIVIWGTLSIMRSMKSCLLLDNYMETILNPYIINVTLAAKMCSQVLCQEQGVCIRKNWNSSDYLHLNPDNFAIQLEKGGKFTVRGKPTLEDLEQFSEKFYCSCYSTLSCKEKADVKDTDAVDVCIADGVCIDAFLKPPMETEEPQIFYNASPSTLSATMFIVSILFLI

SEQ ID NO: 526 - protein, 465 aa, Homo sapiens
  REGION 1..465: note = mature soluble human PH20, amino acid residues36-500
LNFRAPPVIPNVPFLWAWNAPSEFCLGKFDEPLDMSLFSFIGSPRINATGQGVTIFYVDRLGYYPYIDSITGVTVNGGIPQKISLQDHLDKAKKDITFYMPVDNLGMAVIDWEEWRPTWARNWKPKDVYKNRSIELVQQQNVQLSLTEATEKAKQEFEKAGKDFLVETIKLGKLLRPNHLWGYYLFPDCYNHHYKKPGYNGSCFNVEIKRNDDLSWLWNESTALYPSIYLNTQQSPVAATLYVRNRVREAIRVSKIPDAKSPLPVFAYTRIVFTDQVLKFLSQDELVYTFGETVALGASGIVIWGTLSIMRSMKSCLLLDNYMETILNPYIINVTLAAKMCSQVLCQEQGVCIRKNWNSSDYLHLNPDNFAIQLEKGGKFTVRGKPTLEDLEQFSEKFYCSCYSTLSCKEKADVKDTDAVDVCIADGVCIDAFLKPPMETEEPQIFYNASPSTLSATMFIVSILF

SEQ ID NO: 527 - protein, 463 aa, Homo sapiens
  REGION 1..463: note = mature soluble human PH20, amino acid residues36-498
LNFRAPPVIPNVPFLWAWNAPSEFCLGKFDEPLDMSLFSFIGSPRINATGQGVTIFYVDRLGYYPYIDSITGVTVNGGIPQKISLQDHLDKAKKDITFYMPVDNLGMAVIDWEEWRPTWARNWKPKDVYKNRSIELVQQQNVQLSLTEATEKAKQEFEKAGKDFLVETIKLGKLLRPNHLWGYYLFPDCYNHHYKKPGYNGSCFNVEIKRNDDLSWLWNESTALYPSIYLNTQQSPVAATLYVRNRVREAIRVSKIPDAKSPLPVFAYTRIVFTDQVLKFLSQDELVYTFGETVALGASGIVIWGTLSIMRSMKSCLLLDNYMETILNPYIINVTLAAKMCSQVLCQEQGVCIRKNWNSSDYLHLNPDNFAIQLEKGGKFTVRGKPTLEDLEQFSEKFYCSCYSTLSCKEKADVKDTDAVDVCIADGVCIDAFLKPPMETEEPQIFYNASPSTLSATMFIVSI

SEQ ID NO: 528 - protein, 461 aa, Homo sapiens
  REGION 1..461: note = mature soluble human PH20, amino acid residues36-496
LNFRAPPVIPNVPFLWAWNAPSEFCLGKFDEPLDMSLFSFIGSPRINATGQGVTIFYVDRLGYYPYIDSITGVTVNGGIPQKISLQDHLDKAKKDITFYMPVDNLGMAVIDWEEWRPTWARNWKPKDVYKNRSIELVQQQNVQLSLTEATEKAKQEFEKAGKDFLVETIKLGKLLRPNHLWGYYLFPDCYNHHYKKPGYNGSCFNVEIKRNDDLSWLWNESTALYPSIYLNTQQSPVAATLYVRNRVREAIRVSKIPDAKSPLPVFAYTRIVFTDQVLKFLSQDELVYTFGETVALGASGIVIWGTLSIMRSMKSCLLLDNYMETILNPYIINVTLAAKMCSQVLCQEQGVCIRKNWNSSDYLHLNPDNFAIQLEKGGKFTVRGKPTLEDLEQFSEKFYCSCYSTLSCKEKADVKDTDAVDVCIADGVCIDAFLKPPMETEEPQIFYNASPSTLSATMFIV

SEQ ID NO: 529 - protein, 459 aa, Homo sapiens
  REGION 1..459: note = mature soluble human PH20, amino acid residues36-494
LNFRAPPVIPNVPFLWAWNAPSEFCLGKFDEPLDMSLFSFIGSPRINATGQGVTIFYVDRLGYYPYIDSITGVTVNGGIPQKISLQDHLDKAKKDITFYMPVDNLGMAVIDWEEWRPTWARNWKPKDVYKNRSIELVQQQNVQLSLTEATEKAKQEFEKAGKDFLVETIKLGKLLRPNHLWGYYLFPDCYNHHYKKPGYNGSCFNVEIKRNDDLSWLWNESTALYPSIYLNTQQSPVAATLYVRNRVREAIRVSKIPDAKSPLPVFAYTRIVFTDQVLKFLSQDELVYTFGETVALGASGIVIWGTLSIMRSMKSCLLLDNYMETILNPYIINVTLAAKMCSQVLCQEQGVCIRKNWNSSDYLHLNPDNFAIQLEKGGKFTVRGKPTLEDLEQFSEKFYCSCYSTLSCKEKADVKDTDAVDVCIADGVCIDAFLKPPMETEEPQIFYNASPSTLSATMF

SEQ ID NO: 530 - protein, 457 aa, Homo sapiens
  REGION 1..457: note = mature soluble human PH20, amino acid residues36-492
LNFRAPPVIPNVPFLWAWNAPSEFCLGKFDEPLDMSLFSFIGSPRINATGQGVTIFYVDRLGYYPYIDSITGVTVNGGIPQKISLQDHLDKAKKDITFYMPVDNLGMAVIDWEEWRPTWARNWKPKDVYKNRSIELVQQQNVQLSLTEATEKAKQEFEKAGKDFLVETIKLGKLLRPNHLWGYYLFPDCYNHHYKKPGYNGSCFNVEIKRNDDLSWLWNESTALYPSIYLNTQQSPVAATLYVRNRVREAIRVSKIPDAKSPLPVFAYTRIVFTDQVLKFLSQDELVYTFGETVALGASGIVIWGTLSIMRSMKSCLLLDNYMETILNPYIINVTLAAKMCSQVLCQEQGVCIRKNWNSSDYLHLNPDNFAIQLEKGGKFTVRGKPTLEDLEQFSEKFYCSCYSTLSCKEKADVKDTDAVDVCIADGVCIDAFLKPPMETEEPQIFYNASPSTLSAT

SEQ ID NO: 531 - protein, 453 aa, Homo sapiens
  REGION 1..453: note = mature soluble human PH20, amino acid residues36-488
LNFRAPPVIPNVPFLWAWNAPSEFCLGKFDEPLDMSLFSFIGSPRINATGQGVTIFYVDRLGYYPYIDSITGVTVNGGIPQKISLQDHLDKAKKDITFYMPVDNLGMAVIDWEEWRPTWARNWKPKDVYKNRSIELVQQQNVQLSLTEATEKAKQEFEKAGKDFLVETIKLGKLLRPNHLWGYYLFPDCYNHHYKKPGYNGSCFNVEIKRNDDLSWLWNESTALYPSIYLNTQQSPVAATLYVRNRVREAIRVSKIPDAKSPLPVFAYTRIVFTDQVLKFLSQDELVYTFGETVALGASGIVIWGTLSIMRSMKSCLLLDNYMETILNPYIINVTLAAKMCSQVLCQEQGVCIRKNWNSSDYLHLNPDNFAIQLEKGGKFTVRGKPTLEDLEQFSEKFYCSCYSTLSCKEKADVKDTDAVDVCIADGVCIDAFLKPPMETEEPQIFYNASPST

SEQ ID NO: 532 - protein, 451 aa, Homo sapiens
  REGION 1..451: note = mature soluble human PH20, amino acid residues36-486
LNFRAPPVIPNVPFLWAWNAPSEFCLGKFDEPLDMSLFSFIGSPRINATGQGVTIFYVDRLGYYPYIDSITGVTVNGGIPQKISLQDHLDKAKKDITFYMPVDNLGMAVIDWEEWRPTWARNWKPKDVYKNRSIELVQQQNVQLSLTEATEKAKQEFEKAGKDFLVETIKLGKLLRPNHLWGYYLFPDCYNHHYKKPGYNGSCFNVEIKRNDDLSWLWNESTALYPSIYLNTQQSPVAATLYVRNRVREAIRVSKIPDAKSPLPVFAYTRIVFTDQVLKFLSQDELVYTFGETVALGASGIVIWGTLSIMRSMKSCLLLDNYMETILNPYIINVTLAAKMCSQVLCQEQGVCIRKNWNSSDYLHLNPDNFAIQLEKGGKFTVRGKPTLEDLEQFSEKFYCSCYSTLSCKEKADVKDTDAVDVCIADGVCIDAFLKPPMETEEPQIFYNASP

SEQ ID NO: 533 - protein, 326 aa, Homo sapiens
  REGION 1..326: note = adenosine receptor A1
MPPSISAFQAAYIGIEVLIALVSVPGNVLVIWAVKVNQALRDATFCFIVSLAVADVAVGALVIPLAILINIGPQTYFHTCLMVACPVLILTQSSILALLAIAVDRYLRVKIPLRYKMVVTPRRAAVAIAGCWILSFVVGLTPMFGWNNLSAVERAWAANGSMGEPVIKCEFEKVISMEYMVYFNFFVWVLPPLLLMVLIYLEVFYLIRKQLNKKVSASSGDPQKYYGKELKIAKSLALILFLFALSWLPLHILNCITLFCPSCHKPSILTYIAIFLTHGNSAMNPIVYAFRIQKFRVTFLKIWNDHFRCQPAPPIDEDLPEERPDD

SEQ ID NO: 534 - protein, 412 aa, Homo sapiens
  REGION 1..412: note = adenosine receptor A2a
MPIMGSSVYITVELAIAVLAILGNVLVCWAVWLNSNLQNVTNYFVVSLAAADIAVGVLAIPFAITISTGFCAACHGCLFIACFVLVLTQSSIFSLLAIAIDRYIAIRIPLRYNGLVTGTRAKGIIAICWVLSFAIGLTPMLGWNNCGQPKEGKNHSQGCGEGQVACLFEDVVPMNYMVYFNFFACVLVPLLLMLGVYLRIFLAARRQLKQMESQPLPGERARSTLQKEVHAAKSLAIIVGLFALCWLPLHIINCFTFFCPDCSHAPLWLMYLAIVLSHTNSVVNPFIYAYRIREFRQTFRKIIRSHVLRQQEPFKAAGTSARVLAAHGSDGEQVSLRLNGHPPGVWANGSAPHPERRPNGYALGLVSGGSAQESQGNTGLPDVELLSHELKGVCPEPPGLDDPLAQDGAGVS

SEQ ID NO: 535 - protein, 332 aa, Homo sapiens
  REGION 1..332: note = adenosine receptor A2b
MLLETQDALYVALELVIAALSVAGNVLVCAAVGTANTLQTPTNYFLVSLAAADVAVGLFAIPFAITISLGFCTDFYGCLFLACFVLVLTQSSIFSLLAVAVDRYLAICVPLRYKSLVTGTRARGVIAVLWVLAFGIGLTPFLGWNSKDSATNNCTEPWDGTTNESCCLVKCLFENVVPMSYMVYFNFFGCVLPPLLIMLVIYIKIFLVACRQLQRTELMDHSRTTLQREIHAAKSLAMIVGIFALCWLPVHAVNCVTLFQPAQGKNKPKWAMNMAILLSHANSVVNPIVYAYRNRDFRYTFHKIISRYLLCQADVKSGNGQAGVQPALGVGL

SEQ ID NO: 536 - protein, 347 aa, Homo sapiens
  REGION 1..347: note = adenosine receptor A3 isoform 1
MPNNSTALSLANVTYITMEIFIGLCAIVGNVLVICVVKLNPSLQTTTFYFIVSLALADIAVGVLVMPLAIVVSLGITIHFYSCLFMTCLLLIFTHASIMSLLAIAVDRYLRVKLTVRFRIPGLPGCILSFQLKVCFLPVMWLFILLSLALISDAMVMDEKVKRSFVLDTASAICNYNAHYKNHPKYWCRGYFRDYCNIIAFSPNSTNHVALRDTGNQLIVTMSCLTKEDTGWYWCGIQRDFARDDMDFTELIVTDDKGTLANDFWSGKDLSGNKTRSCKAPKVVRKADRSRTSILIICILITGLGIISVISHLTKRRRSQRNRRVGNTLKPFSRVLTPKEMAPTEQM

SEQ ID NO: 537 - protein, 318 aa, Homo sapiens
  REGION 1..318: note = adenosine receptor A3 isoform 2
MPNNSTALSLANVTYITMEIFIGLCAIVGNVLVICVVKLNPSLQTTTFYFIVSLALADIAVGVLVMPLAIVVSLGITIHFYSCLFMTCLLLIFTHASIMSLLAIAVDRYLRVKLTVRYKRVTTHRRIWLALGLCWLVSFLVGLTPMFGWNMKLTSEYHRNVTFLSCQFVSVMRMDYMVYFSFLTWIFIPLVVMCAIYLDIFYIIRNKLSLNLSNSKETGAFYGREFKTAKSLFLVLFLFALSWLPLSIINCIIYFNGEVPQLVLYMGILLSHANSMMNPIVYAYKIKKFKETYLLILKACVVCHPSDSLDTSIEKNSE

SEQ ID NO: 538 - protein, 266 aa, Homo sapiens
  REGION 1..266: note = adenosine receptor A3 isoform 3
MEGSPAGPIEQKEARWESSWEEQPDWTLGCLSPESQFRIPGLPGCILSFQLKVCFLPVMWLFILLSLALISDAMVMDEKVKRSFVLDTASAICNYNAHYKNHPKYWCRGYFRDYCNIIAFSPNSTNHVALRDTGNQLIVTMSCLTKEDTGWYWCGIQRDFARDDMDFTELIVTDDKGTLANDFWSGKDLSGNKTRSCKAPKVVRKADRSRTSILIICILITGLGIISVISHLTKRRRSQRNRRVGNTLKPFSRVLTPKEMAPTEQM

SEQ ID NO: 539 - DNA, 123 bp, synthetic construct
  misc_feature 1..123: note = CTLA-4 binding aptamer M9a-1
  source 1..123: mol_type = other DNA
gggggaattctaatacgactcactatagggagagaggaagagggataggccgcccgagtacaaacgtactcgcctgtttgcccaaccgacataacccagaggtcgatagtacyggatcccccc

SEQ ID NO: 540 - DNA, 40 bp, synthetic construct
  misc_feature 1..40: note = CTLA-4 binding aptamer M9a-4
  source 1..40: mol_type = other DNA
cagccaaaggatatccaagcggcacgccataacacaacac

SEQ ID NO: 541 - DNA, 41 bp, synthetic construct
  misc_feature 1..41: note = CTLA-4 binding aptamer M9a-5
  source 1..41: mol_type = other DNA
caccggaagggctacactcctatatcccctgcccagcccgc

SEQ ID NO: 542 - protein, 510 aa, Homo sapiens
  REGION 1..510: note = ectonucleoside triphosphate diphosphohydrolase(CD39) 1 isoform 1
MEDTKESNVKTFCSKNILAILGFSSIIAVIALLAVGLTQNKALPENVKYGIVLDAGSSHTSLYIYKWPAEKENDTGVVHQVEECRVKGPGISKFVQKVNEIGIYLTDCMERAREVIPRSQHQETPVYLGATAGMRLLRMESEELADRVLDVVERSLSNYPFDFQGARIITGQEEGAYGWITINYLLGKFSQKTRWFSIVPYETNNQETFGALDLGGASTQVTFVPQNQTIESPDNALQFRLYGKDYNVYTHSFLCYGKDQALWQKLAKDIQVASNEILRDPCFHPGYKKVVNVSDLYKTPCTKRFEMTLPFQQFEIQGIGNYQQCHQSILELFNTSYCPYSQCAFNGIFLPPLQGDFGAFSAFYFVMKFLNLTSEKVSQEKVTEMMKKFCAQPWEEIKTSYAGVKEKYLSEYCFSGTYILSLLLQGYHFTADSWEHIHFIGKIQGSDAGWTLGYMLNLTNMIPAEQPLSTPLSHSTYVFLMVLFSLVLFTVAIIGLLIFHKPSYFWKDMV

SEQ ID NO: 543 - protein, 574 aa, Homo sapiens
  REGION 1..574: note = 5'-ectonucleotidase (CD73) isoform 1 preproprotein
  SIGNAL 1..26
MCPRAARAPATLLLALGAVLWPAAGAWELTILHTNDVHSRLEQTSEDSSKCVNASRCMGGVARLFTKVQQIRRAEPNVLLLDAGDQYQGTIWFTVYKGAEVAHFMNALRYDAMALGNHEFDNGVEGLIEPLLKEAKFPILSANIKAKGPLASQISGLYLPYKVLPVGDEVVGIVGYTSKETPFLSNPGTNLVFEDEITALQPEVDKLKTLNVNKIIALGHSGFEMDKLIAQKVRGVDVVVGGHSNTFLYTGNPPSKEVPAGKYPFIVTSDDGRKVPVVQAYAFGKYLGYLKIEFDERGNVISSHGNPILLNSSIPEDPSIKADINKWRIKLDNYSTQELGKTIVYLDGSSQSCRFRECNMGNLICDAMINNNLRHTDEMFWNHVSMCILNGGGIRSPIDERNNGTITWENLAAVLPFGGTFDLVQLKGSTLKKAFEHSVHRYGQSTGEFLQVGGIHVVYDLSRKPGDRVVKLDVLCTKCRVPSYDPLKMDEVYKVILPNFLANGGDGFQMIKDELLRHDSGDQDINVVSTYISKMKVIYPAVEGRIKFSTGSHCHGSFSLIFLSLWAVIFVLYQ

SEQ ID NO: 544 - protein, 223 aa, Homo sapiens
  REGION 1..223: note = CTLA4
MACLGFQRHKAQLNLATRTWPCTLLFFLLFIPVFCKAMHVAQPAVVLASSRGIASFVCEYASPGKATEVRVTVLRQADSQVTEVCAATYMMGNELTFLDDSICTGTSSGNQVNLTIQGLRAMDTGLYICKVELMYPPPYYLGIGNGTQIYVIDPEPCPDSDFLLWILAAVSSGLFFYSFLLTAVSLSKMLKKRSPLTTGVYVKMPPTEPECEKQFQPYFIPIN

SEQ ID NO: 545 - protein, 288 aa, Homo sapiens
  REGION 1..288: note = Programmed cell death protein 1
  SIGNAL 1..20
MQIPQAPWPVVWAVLQLGWRPGWFLDSPDRPWNPPTFSPALLVVTEGDNATFTCSFSNTSESFVLNWYRMSPSNQTDKLAAFPEDRSQPGQDCRFRVTQLPNGRDFHMSVVRARRNDSGTYLCGAISLAPKAQIKESLRAELRVTERRAEVPTAHPSPSPRPAGQFQTLVVGVVGGLLGSLVLLVWVLAVICSRAARGTIGARRTGQPLKEDPSAVPVFSVDYGELDFQWREKTPEPPVPCVPEQTEYATIVFPSGMGTSSPARRGSADGPRSAQPLRPEDGHCSWPL

SEQ ID NO: 546 - protein, 290 aa, Homo sapiens
  REGION 1..290: note = Programmed cell death 1 ligand 1
  SIGNAL 1..18
MRIFAVFIFMTYWHLLNAFTVTVPKDLYVVEYGSNMTIECKFPVEKQLDLAALIVYWEMEDKNIIQFVHGEEDLKVQHSSYRQRARLLKDQLSLGNAALQITDVKLQDAGVYRCMISYGGADYKRITVKVNAPYNKINQRILVVDPVTSEHELTCQAEGYPKAEVIWTSSDHQVLSGKTTTTNSKREEKLFNVTSTLRINTTTNEIFYCTFRRLDPEENHTAELVIPELPLAHPPNERTHLVILGAILLCLGVALTFIFRLRKGRMMDVKKCGIQDTNSKKQSDTHLEET

SEQ ID NO: 547 - DNA, 1536 bp, Homo sapiens
  misc_feature 1..1536: note = ADA2 (CECR1)
  source 1..1536: mol_type = genomic DNA
atgttggtggatggcccatctgagcggccagccctgtgcttcttgctgttggctgtggcaatgtctttcttcggctcagctctatccatagatgaaacacgggcgcatctgttgttgaaagaaaagatgatgcggctgggggggcggctggtgctgaacaccaaggaggagctggccaatgagaggctcatgacgctcaaaatcgctgagatgaaggaggccatgaggaccctgatattcccacccagcatgcactttttccaggccaagcatctcattgagagaagtcaagtgtttaatattctaaggatgatgccaaaaggggctgccttgcacctccatgacattggcatcgtgactatggactggctggtgaggaatgtcacctacaggcctcactgccacatctgtttcaccccaagggggatcatgcagttcagatttgctcacccaactccccgtccatcagaaaaatgttccaagtggattctgctggaggattatcggaagcgggtgcagaacgtcactgagtttgatgacagcttgctgaggaatttcactctggtgacccagcacccggaggtgatttacacaaaccaaaatgttgtctggtcgaaatttgaaaccatcttcttcaccatctctggtctcatccattacgcaccagtgttcagagactatgtcttccggagcatgcaggagttctacgaggacaacgtgctctacatggagatcagagccaggctgctgccggtgtatgagctcagtggagagcaccatgacgaagagtggtcagtgaagacttaccaggaagtagctcagaagtttgtggaaactcaccctgagtttattggaatcaaaatcatttattcggatcacagatccaaagatgtggctgtcatcgcagaatccatccgaatggccatggggctccgaatcaagttccccacggtggtggcagggtttgacctggtggggcatgaggacactggccactccttgcatgactacaaggaagctctgatgatccccgccaaggatggcgttaagctgccttacttcttccacgccggagaaacagactggcagggtacttccatagacaggaacattctggatgctctgatgctgaacactaccagaatcggccatggatttgctttgagcaaacaccccgcagtcaggacttactcctggaaaaaggacatccccatagaagtctgtcccatctctaaccaggtgctgaaactggtgtctgacttgaggaaccaccctgtagccactctgatggccactgggcaccccatggtgatcagctctgatgacccagctatgtttggtgccaaaggcttgtcctatgatttctatgaggtcttcatgggcattggggggatgaaggctgacctgaggaccctcaaacagctggccatgaactctatcaagtacagtaccctgttggagagtgagaaaaatactttcatggaaatctggaagaagagatgggataagttcatagcagatgtggctacaaagtga

SEQ ID NO: 548 - protein, 423 aa, synthetic construct
  REGION 1..423: note = human ADA2 N98-N156Del, mature numbering
IDETRAHLLLKEKMMRLGGRLVLNTKEELANERLMTLKIAEMKEAMRTLIFPPSMHFFQAKHLIERSQVFNILRMMPKGAALHLHDIGIVTMDWLVRFTLVTQHPEVIYTNQNVVWSKFETIFFTISGLIHYAPVFRDYVFRSMQEFYEDNVLYMEIRARLLPVYELSGEHHDEEWSVKTYQEVAQKFVETHPEFIGIKIIYSDHRSKDVAVIAESIRMAMGLRIKFPTVVAGFDLVGHEDTGHSLHDYKEALMIPAKDGVKLPYFFHAGETDWQGTSIDRNILDALMLNTTRIGHGFALSKHPAVRTYSWKKDIPIEVCPISNQVLKLVSDLRNHPVATLMATGHPMVISSDDPAMFGAKGLSYDFYEVFMGIGGMKADLRTLKQLAMNSIKYSTLLESEKNTFMEIWKKRWDKFIADVATK

SEQ ID NO: 549 - protein, 438 aa, synthetic construct
  REGION 1..438: note = human ADA2 C105-E148Del, mature numbering
IDETRAHLLLKEKMMRLGGRLVLNTKEELANERLMTLKIAEMKEAMRTLIFPPSMHFFQAKHLIERSQVFNILRMMPKGAALHLHDIGIVTMDWLVRNVTYRPHFDDSLLRNFTLVTQHPEVIYTNQNVVWSKFETIFFTISGLIHYAPVFRDYVFRSMQEFYEDNVLYMEIRARLLPVYELSGEHHDEEWSVKTYQEVAQKFVETHPEFIGIKIIYSDHRSKDVAVIAESIRMAMGLRIKFPTVVAGFDLVGHEDTGHSLHDYKEALMIPAKDGVKLPYFFHAGETDWQGTSIDRNILDALMLNTTRIGHGFALSKHPAVRTYSWKKDIPIEVCPISNQVLKLVSDLRNHPVATLMATGHPMVISSDDPAMFGAKGLSYDFYEVFMGIGGMKADLRTLKQLAMNSIKYSTLLESEKNTFMEIWKKRWDKFIADVATK

SEQ ID NO: 550 - protein, 439 aa, synthetic construct
  REGION 1..439: note = human ADA2 C105-T147Del, mature numbering
IDETRAHLLLKEKMMRLGGRLVLNTKEELANERLMTLKIAEMKEAMRTLIFPPSMHFFQAKHLIERSQVFNILRMMPKGAALHLHDIGIVTMDWLVRNVTYRPHEFDDSLLRNFTLVTQHPEVIYTNQNVVWSKFETIFFTISGLIHYAPVFRDYVFRSMQEFYEDNVLYMEIRARLLPVYELSGEHHDEEWSVKTYQEVAQKFVETHPEFIGIKIIYSDHRSKDVAVIAESIRMAMGLRIKFPTVVAGFDLVGHEDTGHSLHDYKEALMIPAKDGVKLPYFFHAGETDWQGTSIDRNILDALMLNTTRIGHGFALSKHPAVRTYSWKKDIPIEVCPISNQVLKLVSDLRNHPVATLMATGHPMVISSDDPAMFGAKGLSYDFYEVFMGIGGMKADLRTLKQLAMNSIKYSTLLESEKNTFMEIWKKRWDKFIADVATK

SEQ ID NO: 551 - protein, 509 aa, Homo sapiens
  REGION 1..509: note = human (PH20 precursor) (1-509)
MGVLKFKHIFFRSFVKSSGVSQIVFTFLLIPCCLTLNFRAPPVIPNVPFLWAWNAPSEFCLGKFDEPLDMSLFSFIGSPRINATGQGVTIFYVDRLGYYPYIDSITGVTVNGGIPQKISLQDHLDKAKKDITFYMPVDNLGMAVIDWEEWRPTWARNWKPKDVYKNRSIELVQQQNVQLSLTEATEKAKQEFEKAGKDFLVETIKLGKLLRPNHLWGYYLFPDCYNHHYKKPGYNGSCFNVEIKRNDDLSWLWNESTALYPSIYLNTQQSPVAATLYVRNRVREAIRVSKIPDAKSPLPVFAYTRIVFTDQVLKFLSQDELVYTFGETVALGASGIVIWGTLSIMRSMKSCLLLDNYMETILNPYIINVTLAAKMCSQVLCQEQGVCIRKNWNSSDYLHLNPDNFAIQLEKGGKFTVRGKPTLEDLEQFSEKFYCSCYSTLSCKEKADVKDTDAVDVCIADGVCIDAFLKPPMETEEPQIFYNASPSTLSATMFIVSILFLIISSVASL

SEQ ID NO: 552 - protein, 482 aa, synthetic construct
  REGION 1..482: note = human ADA2 R125N/P126A, mature numbering
IDETRAHLLLKEKMMRLGGRLVLNTKEELANERLMTLKIAEMKEAMRTLIFPPSMHFFQAKHLIERSQVFNILRMMPKGAALHLHDIGIVTMDWLVRNVTYRPHCHICFTPRGIMQFRFAHPTPNASEKCSKWILLEDYRKRVQNVTEFDDSLLRNFTLVTQHPEVIYTNQNVVWSKFETIFFTISGLIHYAPVFRDYVFRSMQEFYEDNVLYMEIRARLLPVYELSGEHHDEEWSVKTYQEVAQKFVETHPEFIGIKIIYSDHRSKDVAVIAESIRMAMGLRIKFPTVVAGFDLVGHEDTGHSLHDYKEALMIPAKDGVKLPYFFHAGETDWQGTSIDRNILDALMLNTTRIGHGFALSKHPAVRTYSWKKDIPIEVCPISNQVLKLVSDLRNHPVATLMATGHPMVISSDDPAMFGAKGLSYDFYEVFMGIGGMKADLRTLKQLAMNSIKYSTLLESEKNTFMEIWKKRWDKFIADVATK

SEQ ID NO: 553 - protein, 482 aa, synthetic construct
  REGION 1..482: note = human ADA2 S127N/K129S, mature numbering
IDETRAHLLLKEKMMRLGGRLVLNTKEELANERLMTLKIAEMKEAMRTLIFPPSMHFFQAKHLIERSQVFNILRMMPKGAALHLHDIGIVTMDWLVRNVTYRPHCHICFTPRGIMQFRFAHPTPRPNESCSKWILLEDYRKRVQNVTEFDDSLLRNFTLVTQHPEVIYTNQNVVWSKFETIFFTISGLIHYAPVFRDYVFRSMQEFYEDNVLYMEIRARLLPVYELSGEHHDEEWSVKTYQEVAQKFVETHPEFIGIKIIYSDHRSKDVAVIAESIRMAMGLRIKFPTVVAGFDLVGHEDTGHSLHDYKEALMIPAKDGVKLPYFFHAGETDWQGTSIDRNILDALMLNTTRIGHGFALSKHPAVRTYSWKKDIPIEVCPISNQVLKLVSDLRNHPVATLMATGHPMVISSDDPAMFGAKGLSYDFYEVFMGIGGMKADLRTLKQLAMNSIKYSTLLESEKNTFMEIWKKRWDKFIADVATK

SEQ ID NO: 554 - protein, 482 aa, synthetic construct
  REGION 1..482: note = human ADA2 P126N/E128T, mature numbering
IDETRAHLLLKEKMMRLGGRLVLNTKEELANERLMTLKIAEMKEAMRTLIFPPSMHFFQAKHLIERSQVFNILRMMPKGAALHLHDIGIVTMDWLVRNVTYRPHCHICFTPRGIMQFRFAHPTPRNSTKCSKWILLEDYRKRVQNVTEFDDSLLRNFTLVTQHPEVIYTNQNVVWSKFETIFFTISGLIHYAPVFRDYVFRSMQEFYEDNVLYMEIRARLLPVYELSGEHHDEEWSVKTYQEVAQKFVETHPEFIGIKIIYSDHRSKDVAVIAESIRMAMGLRIKFPTVVAGFDLVGHEDTGHSLHDYKEALMIPAKDGVKLPYFFHAGETDWQGTSIDRNILDALMLNTTRIGHGFALSKHPAVRTYSWKKDIPIEVCPISNQVLKLVSDLRNHPVATLMATGHPMVISSDDPAMFGAKGLSYDFYEVFMGIGGMKADLRTLKQLAMNSIKYSTLLESEKNTFMEIWKKRWDKFIADVATK

SEQ ID NO: 555 - protein, 482 aa, synthetic construct
  REGION 1..482: note = human ADA2 R112N/I114T, mature numbering
IDETRAHLLLKEKMMRLGGRLVLNTKEELANERLMTLKIAEMKEAMRTLIFPPSMHFFQAKHLIERSQVFNILRMMPKGAALHLHDIGIVTMDWLVRNVTYRPHCHICFTPNGTMQFRFAHPTPRPSEKCSKWILLEDYRKRVQNVTEFDDSLLRNFTLVTQHPEVIYTNQNVVWSKFETIFFTISGLIHYAPVFRDYVFRSMQEFYEDNVLYMEIRARLLPVYELSGEHHDEEWSVKTYQEVAQKFVETHPEFIGIKIIYSDHRSKDVAVIAESIRMAMGLRIKFPTVVAGFDLVGHEDTGHSLHDYKEALMIPAKDGVKLPYFFHAGETDWQGTSIDRNILDALMLNTTRIGHGFALSKHPAVRTYSWKKDIPIEVCPISNQVLKLVSDLRNHPVATLMATGHPMVISSDDPAMFGAKGLSYDFYEVFMGIGGMKADLRTLKQLAMNSIKYSTLLESEKNTFMEIWKKRWDKFIADVATK

SEQ ID NO: 556 - protein, 482 aa, synthetic construct
  REGION 1..482: note = human ADA2 I134N/L135C/L136T, mature numbering
IDETRAHLLLKEKMMRLGGRLVLNTKEELANERLMTLKIAEMKEAMRTLIFPPSMHFFQAKHLIERSQVFNILRMMPKGAALHLHDIGIVTMDWLVRNVTYRPHCHICFTPRGIMQFRFAHPTPRPSEKCSKWNCTEDYRKRVQNVTEFDDSLLRNFTLVTQHPEVIYTNQNVVWSKFETIFFTISGLIHYAPVFRDYVFRSMQEFYEDNVLYMEIRARLLPVYELSGEHHDEEWSVKTYQEVAQKFVETHPEFIGIKIIYSDHRSKDVAVIAESIRMAMGLRIKFPTVVAGFDLVGHEDTGHSLHDYKEALMIPAKDGVKLPYFFHAGETDWQGTSIDRNILDALMLNTTRIGHGFALSKHPAVRTYSWKKDIPIEVCPISNQVLKLVSDLRNHPVATLMATGHPMVISSDDPAMFGAKGLSYDFYEVFMGIGGMKADLRTLKQLAMNSIKYSTLLESEKNTFMEIWKKRWDKFIADVATK

SEQ ID NO: 557 - protein, 482 aa, synthetic construct
  REGION 1..482: note = human ADA2 I134N/L135S/L136T, mature numbering
IDETRAHLLLKEKMMRLGGRLVLNTKEELANERLMTLKIAEMKEAMRTLIFPPSMHFFQAKHLIERSQVFNILRMMPKGAALHLHDIGIVTMDWLVRNVTYRPHCHICFTPRGIMQFRFAHPTPRPSEKCSKWNSTEDYRKRVQNVTEFDDSLLRNFTLVTQHPEVIYTNQNVVWSKFETIFFTISGLIHYAPVFRDYVFRSMQEFYEDNVLYMEIRARLLPVYELSGEHHDEEWSVKTYQEVAQKFVETHPEFIGIKIIYSDHRSKDVAVIAESIRMAMGLRIKFPTVVAGFDLVGHEDTGHSLHDYKEALMIPAKDGVKLPYFFHAGETDWQGTSIDRNILDALMLNTTRIGHGFALSKHPAVRTYSWKKDIPIEVCPISNQVLKLVSDLRNHPVATLMATGHPMVISSDDPAMFGAKGLSYDFYEVFMGIGGMKADLRTLKQLAMNSIKYSTLLESEKNTFMEIWKKRWDKFIADVATK

SEQ ID NO: 558 - protein, 482 aa, synthetic construct
  REGION 1..482: note = human ADA2 R142N/Q144S, mature numbering
IDETRAHLLLKEKMMRLGGRLVLNTKEELANERLMTLKIAEMKEAMRTLIFPPSMHFFQAKHLIERSQVFNILRMMPKGAALHLHDIGIVTMDWLVRNVTYRPHCHICFTPRGIMQFRFAHPTPRPSEKCSKWILLEDYRKNVSNVTEFDDSLLRNFTLVTQHPEVIYTNQNVVWSKFETIFFTISGLIHYAPVFRDYVFRSMQEFYEDNVLYMEIRARLLPVYELSGEHHDEEWSVKTYQEVAQKFVETHPEFIGIKIIYSDHRSKDVAVIAESIRMAMGLRIKFPTVVAGFDLVGHEDTGHSLHDYKEALMIPAKDGVKLPYFFHAGETDWQGTSIDRNILDALMLNTTRIGHGFALSKHPAVRTYSWKKDIPIEVCPISNQVLKLVSDLRNHPVATLMATGHPMVISSDDPAMFGAKGLSYDFYEVFMGIGGMKADLRTLKQLAMNSIKYSTLLESEKNTFMEIWKKRWDKFIADVATK

SEQ ID NO: 559 - protein, 482 aa, synthetic construct
  REGION 1..482: note = human ADA2 E137N/Y139T, mature numbering
IDETRAHLLLKEKMMRLGGRLVLNTKEELANERLMTLKIAEMKEAMRTLIFPPSMHFFQAKHLIERSQVFNILRMMPKGAALHLHDIGIVTMDWLVRNVTYRPHCHICFTPRGIMQFRFAHPTPRPSEKCSKWILLNDTRKRVQNVTEFDDSLLRNFTLVTQHPEVIYTNQNVVWSKFETIFFTISGLIHYAPVFRDYVFRSMQEFYEDNVLYMEIRARLLPVYELSGEHHDEEWSVKTYQEVAQKFVETHPEFIGIKIIYSDHRSKDVAVIAESIRMAMGLRIKFPTVVAGFDLVGHEDTGHSLHDYKEALMIPAKDGVKLPYFFHAGETDWQGTSIDRNILDALMLNTTRIGHGFALSKHPAVRTYSWKKDIPIEVCPISNQVLKLVSDLRNHPVATLMATGHPMVISSDDPAMFGAKGLSYDFYEVFMGIGGMKADLRTLKQLAMNSIKYSTLLESEKNTFMEIWKKRWDKFIADVATK

SEQ ID NO: 560 - protein, 482 aa, synthetic construct
  REGION 1..482: note = human ADA2 P111N/G113S, mature numbering
IDETRAHLLLKEKMMRLGGRLVLNTKEELANERLMTLKIAEMKEAMRTLIFPPSMHFFQAKHLIERSQVFNILRMMPKGAALHLHDIGIVTMDWLVRNVTYRPHCHICFTNRSIMQFRFAHPTPRPSEKCSKWILLEDYRKRVQNVTEFDDSLLRNFTLVTQHPEVIYTNQNVVWSKFETIFFTISGLIHYAPVFRDYVFRSMQEFYEDNVLYMEIRARLLPVYELSGEHHDEEWSVKTYQEVAQKFVETHPEFIGIKIIYSDHRSKDVAVIAESIRMAMGLRIKFPTVVAGFDLVGHEDTGHSLHDYKEALMIPAKDGVKLPYFFHAGETDWQGTSIDRNILDALMLNTTRIGHGFALSKHPAVRTYSWKKDIPIEVCPISNQVLKLVSDLRNHPVATLMATGHPMVISSDDPAMFGAKGLSYDFYEVFMGIGGMKADLRTLKQLAMNSIKYSTLLESEKNTFMEIWKKRWDKFIADVATK

SEQ ID NO: 561 - protein, 482 aa, synthetic construct
  REGION 1..482: note = human ADA2 F119S, mature numbering
IDETRAHLLLKEKMMRLGGRLVLNTKEELANERLMTLKIAEMKEAMRTLIFPPSMHFFQAKHLIERSQVFNILRMMPKGAALHLHDIGIVTMDWLVRNVTYRPHCHICFTPRGIMQFRSAHPTPRPSEKCSKWILLEDYRKRVQNVTEFDDSLLRNFTLVTQHPEVIYTNQNVVWSKFETIFFTISGLIHYAPVFRDYVFRSMQEFYEDNVLYMEIRARLLPVYELSGEHHDEEWSVKTYQEVAQKFVETHPEFIGIKIIYSDHRSKDVAVIAESIRMAMGLRIKFPTVVAGFDLVGHEDTGHSLHDYKEALMIPAKDGVKLPYFFHAGETDWQGTSIDRNILDALMLNTTRIGHGFALSKHPAVRTYSWKKDIPIEVCPISNQVLKLVSDLRNHPVATLMATGHPMVISSDDPAMFGAKGLSYDFYEVFMGIGGMKADLRTLKQLAMNSIKYSTLLESEKNTFMEIWKKRWDKFIADVATK

SEQ ID NO: 562 - protein, 482 aa, synthetic construct
  REGION 1..482: note = human ADA2 F119K, mature numbering
IDETRAHLLLKEKMMRLGGRLVLNTKEELANERLMTLKIAEMKEAMRTLIFPPSMHFFQAKHLIERSQVFNILRMMPKGAALHLHDIGIVTMDWLVRNVTYRPHCHICFTPRGIMQFRKAHPTPRPSEKCSKWILLEDYRKRVQNVTEFDDSLLRNFTLVTQHPEVIYTNQNVVWSKFETIFFTISGLIHYAPVFRDYVFRSMQEFYEDNVLYMEIRARLLPVYELSGEHHDEEWSVKTYQEVAQKFVETHPEFIGIKIIYSDHRSKDVAVIAESIRMAMGLRIKFPTVVAGFDLVGHEDTGHSLHDYKEALMIPAKDGVKLPYFFHAGETDWQGTSIDRNILDALMLNTTRIGHGFALSKHPAVRTYSWKKDIPIEVCPISNQVLKLVSDLRNHPVATLMATGHPMVISSDDPAMFGAKGLSYDFYEVFMGIGGMKADLRTLKQLAMNSIKYSTLLESEKNTFMEIWKKRWDKFIADVATK

SEQ ID NO: 563 - protein, 482 aa, synthetic construct
  REGION 1..482: note = human ADA2 Y224R, mature numbering
IDETRAHLLLKEKMMRLGGRLVLNTKEELANERLMTLKIAEMKEAMRTLIFPPSMHFFQAKHLIERSQVFNILRMMPKGAALHLHDIGIVTMDWLVRNVTYRPHCHICFTPRGIMQFRFAHPTPRPSEKCSKWILLEDYRKRVQNVTEFDDSLLRNFTLVTQHPEVIYTNQNVVWSKFETIFFTISGLIHYAPVFRDYVFRSMQEFYEDNVLYMEIRARLLPVRELSGEHHDEEWSVKTYQEVAQKFVETHPEFIGIKIIYSDHRSKDVAVIAESIRMAMGLRIKFPTVVAGFDLVGHEDTGHSLHDYKEALMIPAKDGVKLPYFFHAGETDWQGTSIDRNILDALMLNTTRIGHGFALSKHPAVRTYSWKKDIPIEVCPISNQVLKLVSDLRNHPVATLMATGHPMVISSDDPAMFGAKGLSYDFYEVFMGIGGMKADLRTLKQLAMNSIKYSTLLESEKNTFMEIWKKRWDKFIADVATK

SEQ ID NO: 564 - protein, 482 aa, synthetic construct
  REGION 1..482: note = human ADA2 Y224N, mature numbering
IDETRAHLLLKEKMMRLGGRLVLNTKEELANERLMTLKIAEMKEAMRTLIFPPSMHFFQAKHLIERSQVFNILRMMPKGAALHLHDIGIVTMDWLVRNVTYRPHCHICFTPRGIMQFRFAHPTPRPSEKCSKWILLEDYRKRVQNVTEFDDSLLRNFTLVTQHPEVIYTNQNVVWSKFETIFFTISGLIHYAPVFRDYVFRSMQEFYEDNVLYMEIRARLLPVNELSGEHHDEEWSVKTYQEVAQKFVETHPEFIGIKIIYSDHRSKDVAVIAESIRMAMGLRIKFPTVVAGFDLVGHEDTGHSLHDYKEALMIPAKDGVKLPYFFHAGETDWQGTSIDRNILDALMLNTTRIGHGFALSKHPAVRTYSWKKDIPIEVCPISNQVLKLVSDLRNHPVATLMATGHPMVISSDDPAMFGAKGLSYDFYEVFMGIGGMKADLRTLKQLAMNSIKYSTLLESEKNTFMEIWKKRWDKFIADVATK

SEQ ID NO: 565 - protein, 482 aa, synthetic construct
  REGION 1..482: note = human ADA2 Y191S, mature numbering
IDETRAHLLLKEKMMRLGGRLVLNTKEELANERLMTLKIAEMKEAMRTLIFPPSMHFFQAKHLIERSQVFNILRMMPKGAALHLHDIGIVTMDWLVRNVTYRPHCHICFTPRGIMQFRFAHPTPRPSEKCSKWILLEDYRKRVQNVTEFDDSLLRNFTLVTQHPEVIYTNQNVVWSKFETIFFTISGLIHSAPVFRDYVFRSMQEFYEDNVLYMEIRARLLPVYELSGEHHDEEWSVKTYQEVAQKFVETHPEFIGIKIIYSDHRSKDVAVIAESIRMAMGLRIKFPTVVAGFDLVGHEDTGHSLHDYKEALMIPAKDGVKLPYFFHAGETDWQGTSIDRNILDALMLNTTRIGHGFALSKHPAVRTYSWKKDIPIEVCPISNQVLKLVSDLRNHPVATLMATGHPMVISSDDPAMFGAKGLSYDFYEVFMGIGGMKADLRTLKQLAMNSIKYSTLLESEKNTFMEIWKKRWDKFIADVATK

SEQ ID NO: 566 - protein, 482 aa, synthetic construct
  REGION 1..482: note = human ADA2 Y191D, mature numbering
IDETRAHLLLKEKMMRLGGRLVLNTKEELANERLMTLKIAEMKEAMRTLIFPPSMHFFQAKHLIERSQVFNILRMMPKGAALHLHDIGIVTMDWLVRNVTYRPHCHICFTPRGIMQFRFAHPTPRPSEKCSKWILLEDYRKRVQNVTEFDDSLLRNFTLVTQHPEVIYTNQNVVWSKFETIFFTISGLIHDAPVFRDYVFRSMQEFYEDNVLYMEIRARLLPVYELSGEHHDEEWSVKTYQEVAQKFVETHPEFIGIKIIYSDHRSKDVAVIAESIRMAMGLRIKFPTVVAGFDLVGHEDTGHSLHDYKEALMIPAKDGVKLPYFFHAGETDWQGTSIDRNILDALMLNTTRIGHGFALSKHPAVRTYSWKKDIPIEVCPISNQVLKLVSDLRNHPVATLMATGHPMVISSDDPAMFGAKGLSYDFYEVFMGIGGMKADLRTLKQLAMNSIKYSTLLESEKNTFMEIWKKRWDKFIADVATK

SEQ ID NO: 567 - protein, 482 aa, synthetic construct
  REGION 1..482: note = human ADA2 F183K, mature numbering
IDETRAHLLLKEKMMRLGGRLVLNTKEELANERLMTLKIAEMKEAMRTLIFPPSMHFFQAKHLIERSQVFNILRMMPKGAALHLHDIGIVTMDWLVRNVTYRPHCHICFTPRGIMQFRFAHPTPRPSEKCSKWILLEDYRKRVQNVTEFDDSLLRNFTLVTQHPEVIYTNQNVVWSKFETIFKTISGLIHYAPVFRDYVFRSMQEFYEDNVLYMEIRARLLPVYELSGEHHDEEWSVKTYQEVAQKFVETHPEFIGIKIIYSDHRSKDVAVIAESIRMAMGLRIKFPTVVAGFDLVGHEDTGHSLHDYKEALMIPAKDGVKLPYFFHAGETDWQGTSIDRNILDALMLNTTRIGHGFALSKHPAVRTYSWKKDIPIEVCPISNQVLKLVSDLRNHPVATLMATGHPMVISSDDPAMFGAKGLSYDFYEVFMGIGGMKADLRTLKQLAMNSIKYSTLLESEKNTFMEIWKKRWDKFIADVATK

SEQ ID NO: 568 - protein, 482 aa, synthetic construct
  REGION 1..482: note = human ADA2 Y191D/Y224R, mature numbering
IDETRAHLLLKEKMMRLGGRLVLNTKEELANERLMTLKIAEMKEAMRTLIFPPSMHFFQAKHLIERSQVFNILRMMPKGAALHLHDIGIVTMDWLVRNVTYRPHCHICFTPRGIMQFRFAHPTPRPSEKCSKWILLEDYRKRVQNVTEFDDSLLRNFTLVTQHPEVIYTNQNVVWSKFETIFFTISGLIHDAPVFRDYVFRSMQEFYEDNVLYMEIRARLLPVRELSGEHHDEEWSVKTYQEVAQKFVETHPEFIGIKIIYSDHRSKDVAVIAESIRMAMGLRIKFPTVVAGFDLVGHEDTGHSLHDYKEALMIPAKDGVKLPYFFHAGETDWQGTSIDRNILDALMLNTTRIGHGFALSKHPAVRTYSWKKDIPIEVCPISNQVLKLVSDLRNHPVATLMATGHPMVISSDDPAMFGAKGLSYDFYEVFMGIGGMKADLRTLKQLAMNSIKYSTLLESEKNTFMEIWKKRWDKFIADVATK

SEQ ID NO: 569 - protein, 482 aa, synthetic construct
  REGION 1..482: note = human ADA2 F109S, mature numbering
IDETRAHLLLKEKMMRLGGRLVLNTKEELANERLMTLKIAEMKEAMRTLIFPPSMHFFQAKHLIERSQVFNILRMMPKGAALHLHDIGIVTMDWLVRNVTYRPHCHICSTPRGIMQFRFAHPTPRPSEKCSKWILLEDYRKRVQNVTEFDDSLLRNFTLVTQHPEVIYTNQNVVWSKFETIFFTISGLIHYAPVFRDYVFRSMQEFYEDNVLYMEIRARLLPVYELSGEHHDEEWSVKTYQEVAQKFVETHPEFIGIKIIYSDHRSKDVAVIAESIRMAMGLRIKFPTVVAGFDLVGHEDTGHSLHDYKEALMIPAKDGVKLPYFFHAGETDWQGTSIDRNILDALMLNTTRIGHGFALSKHPAVRTYSWKKDIPIEVCPISNQVLKLVSDLRNHPVATLMATGHPMVISSDDPAMFGAKGLSYDFYEVFMGIGGMKADLRTLKQLAMNSIKYSTLLESEKNTFMEIWKKRWDKFIADVATK

SEQ ID NO: 570 - protein, 482 aa, synthetic construct
  REGION 1..482: note = human ADA2 F109A, mature numbering
IDETRAHLLLKEKMMRLGGRLVLNTKEELANERLMTLKIAEMKEAMRTLIFPPSMHFFQAKHLIERSQVFNILRMMPKGAALHLHDIGIVTMDWLVRNVTYRPHCHICATPRGIMQFRFAHPTPRPSEKCSKWILLEDYRKRVQNVTEFDDSLLRNFTLVTQHPEVIYTNQNVVWSKFETIFFTISGLIHYAPVFRDYVFRSMQEFYEDNVLYMEIRARLLPVYELSGEHHDEEWSVKTYQEVAQKFVETHPEFIGIKIIYSDHRSKDVAVIAESIRMAMGLRIKFPTVVAGFDLVGHEDTGHSLHDYKEALMIPAKDGVKLPYFFHAGETDWQGTSIDRNILDALMLNTTRIGHGFALSKHPAVRTYSWKKDIPIEVCPISNQVLKLVSDLRNHPVATLMATGHPMVISSDDPAMFGAKGLSYDFYEVFMGIGGMKADLRTLKQLAMNSIKYSTLLESEKNTFMEIWKKRWDKFIADVATK

SEQ ID NO: 571 - protein, 482 aa, synthetic construct
  REGION 1..482: note = human ADA2 R118D, mature numbering
IDETRAHLLLKEKMMRLGGRLVLNTKEELANERLMTLKIAEMKEAMRTLIFPPSMHFFQAKHLIERSQVFNILRMMPKGAALHLHDIGIVTMDWLVRNVTYRPHCHICFTPRGIMQFDFAHPTPRPSEKCSKWILLEDYRKRVQNVTEFDDSLLRNFTLVTQHPEVIYTNQNVVWSKFETIFFTISGLIHYAPVFRDYVFRSMQEFYEDNVLYMEIRARLLPVYELSGEHHDEEWSVKTYQEVAQKFVETHPEFIGIKIIYSDHRSKDVAVIAESIRMAMGLRIKFPTVVAGFDLVGHEDTGHSLHDYKEALMIPAKDGVKLPYFFHAGETDWQGTSIDRNILDALMLNTTRIGHGFALSKHPAVRTYSWKKDIPIEVCPISNQVLKLVSDLRNHPVATLMATGHPMVISSDDPAMFGAKGLSYDFYEVFMGIGGMKADLRTLKQLAMNSIKYSTLLESEKNTFMEIWKKRWDKFIADVATK

SEQ ID NO: 572 - protein, 482 aa, synthetic construct
  REGION 1..482: note = human ADA2 R118A, mature numbering
IDETRAHLLLKEKMMRLGGRLVLNTKEELANERLMTLKIAEMKEAMRTLIFPPSMHFFQAKHLIERSQVFNILRMMPKGAALHLHDIGIVTMDWLVRNVTYRPHCHICFTPRGIMQFAFAHPTPRPSEKCSKWILLEDYRKRVQNVTEFDDSLLRNFTLVTQHPEVIYTNQNVVWSKFETIFFTISGLIHYAPVFRDYVFRSMQEFYEDNVLYMEIRARLLPVYELSGEHHDEEWSVKTYQEVAQKFVETHPEFIGIKIIYSDHRSKDVAVIAESIRMAMGLRIKFPTVVAGFDLVGHEDTGHSLHDYKEALMIPAKDGVKLPYFFHAGETDWQGTSIDRNILDALMLNTTRIGHGFALSKHPAVRTYSWKKDIPIEVCPISNQVLKLVSDLRNHPVATLMATGHPMVISSDDPAMFGAKGLSYDFYEVFMGIGGMKADLRTLKQLAMNSIKYSTLLESEKNTFMEIWKKRWDKFIADVATK

SEQ ID NO: 573 - protein, 482 aa, synthetic construct
  REGION 1..482: note = human ADA2 Y139T, mature numbering
IDETRAHLLLKEKMMRLGGRLVLNTKEELANERLMTLKIAEMKEAMRTLIFPPSMHFFQAKHLIERSQVFNILRMMPKGAALHLHDIGIVTMDWLVRNVTYRPHCHICFTPRGIMQFRFAHPTPRPSEKCSKWILLEDTRKRVQNVTEFDDSLLRNFTLVTQHPEVIYTNQNVVWSKFETIFFTISGLIHYAPVFRDYVFRSMQEFYEDNVLYMEIRARLLPVYELSGEHHDEEWSVKTYQEVAQKFVETHPEFIGIKIIYSDHRSKDVAVIAESIRMAMGLRIKFPTVVAGFDLVGHEDTGHSLHDYKEALMIPAKDGVKLPYFFHAGETDWQGTSIDRNILDALMLNTTRIGHGFALSKHPAVRTYSWKKDIPIEVCPISNQVLKLVSDLRNHPVATLMATGHPMVISSDDPAMFGAKGLSYDFYEVFMGIGGMKADLRTLKQLAMNSIKYSTLLESEKNTFMEIWKKRWDKFIADVATK

SEQ ID NO: 574 - protein, 482 aa, synthetic construct
  REGION 1..482: note = human ADA2 Y139A, mature numbering
IDETRAHLLLKEKMMRLGGRLVLNTKEELANERLMTLKIAEMKEAMRTLIFPPSMHFFQAKHLIERSQVFNILRMMPKGAALHLHDIGIVTMDWLVRNVTYRPHCHICFTPRGIMQFRFAHPTPRPSEKCSKWILLEDARKRVQNVTEFDDSLLRNFTLVTQHPEVIYTNQNVVWSKFETIFFTISGLIHYAPVFRDYVFRSMQEFYEDNVLYMEIRARLLPVYELSGEHHDEEWSVKTYQEVAQKFVETHPEFIGIKIIYSDHRSKDVAVIAESIRMAMGLRIKFPTVVAGFDLVGHEDTGHSLHDYKEALMIPAKDGVKLPYFFHAGETDWQGTSIDRNILDALMLNTTRIGHGFALSKHPAVRTYSWKKDIPIEVCPISNQVLKLVSDLRNHPVATLMATGHPMVISSDDPAMFGAKGLSYDFYEVFMGIGGMKADLRTLKQLAMNSIKYSTLLESEKNTFMEIWKKRWDKFIADVATK

SEQ ID NO: 575 - protein, 482 aa, synthetic construct
  REGION 1..482: note = human ADA2 W133S, mature numbering
IDETRAHLLLKEKMMRLGGRLVLNTKEELANERLMTLKIAEMKEAMRTLIFPPSMHFFQAKHLIERSQVFNILRMMPKGAALHLHDIGIVTMDWLVRNVTYRPHCHICFTPRGIMQFRFAHPTPRPSEKCSKSILLEDYRKRVQNVTEFDDSLLRNFTLVTQHPEVIYTNQNVVWSKFETIFFTISGLIHYAPVFRDYVFRSMQEFYEDNVLYMEIRARLLPVYELSGEHHDEEWSVKTYQEVAQKFVETHPEFIGIKIIYSDHRSKDVAVIAESIRMAMGLRIKFPTVVAGFDLVGHEDTGHSLHDYKEALMIPAKDGVKLPYFFHAGETDWQGTSIDRNILDALMLNTTRIGHGFALSKHPAVRTYSWKKDIPIEVCPISNQVLKLVSDLRNHPVATLMATGHPMVISSDDPAMFGAKGLSYDFYEVFMGIGGMKADLRTLKQLAMNSIKYSTLLESEKNTFMEIWKKRWDKFIADVATK

SEQ ID NO: 576 - protein, 482 aa, synthetic construct
  REGION 1..482: note = human ADA2 W133T, mature numbering
IDETRAHLLLKEKMMRLGGRLVLNTKEELANERLMTLKIAEMKEAMRTLIFPPSMHFFQAKHLIERSQVFNILRMMPKGAALHLHDIGIVTMDWLVRNVTYRPHCHICFTPRGIMQFRFAHPTPRPSEKCSKTILLEDYRKRVQNVTEFDDSLLRNFTLVTQHPEVIYTNQNVVWSKFETIFFTISGLIHYAPVFRDYVFRSMQEFYEDNVLYMEIRARLLPVYELSGEHHDEEWSVKTYQEVAQKFVETHPEFIGIKIIYSDHRSKDVAVIAESIRMAMGLRIKFPTVVAGFDLVGHEDTGHSLHDYKEALMIPAKDGVKLPYFFHAGETDWQGTSIDRNILDALMLNTTRIGHGFALSKHPAVRTYSWKKDIPIEVCPISNQVLKLVSDLRNHPVATLMATGHPMVISSDDPAMFGAKGLSYDFYEVFMGIGGMKADLRTLKQLAMNSIKYSTLLESEKNTFMEIWKKRWDKFIADVATK

SEQ ID NO: 577 - protein, 482 aa, synthetic construct
  REGION 1..482: note = human ADA2 P124A, mature numbering
IDETRAHLLLKEKMMRLGGRLVLNTKEELANERLMTLKIAEMKEAMRTLIFPPSMHFFQAKHLIERSQVFNILRMMPKGAALHLHDIGIVTMDWLVRNVTYRPHCHICFTPRGIMQFRFAHPTARPSEKCSKWILLEDYRKRVQNVTEFDDSLLRNFTLVTQHPEVIYTNQNVVWSKFETIFFTISGLIHYAPVFRDYVFRSMQEFYEDNVLYMEIRARLLPVYELSGEHHDEEWSVKTYQEVAQKFVETHPEFIGIKIIYSDHRSKDVAVIAESIRMAMGLRIKFPTVVAGFDLVGHEDTGHSLHDYKEALMIPAKDGVKLPYFFHAGETDWQGTSIDRNILDALMLNTTRIGHGFALSKHPAVRTYSWKKDIPIEVCPISNQVLKLVSDLRNHPVATLMATGHPMVISSDDPAMFGAKGLSYDFYEVFMGIGGMKADLRTLKQLAMNSIKYSTLLESEKNTFMEIWKKRWDKFIADVATK

SEQ ID NO: 578 - protein, 482 aa, synthetic construct
  REGION 1..482: note = human ADA2 P124S, mature numbering
IDETRAHLLLKEKMMRLGGRLVLNTKEELANERLMTLKIAEMKEAMRTLIFPPSMHFFQAKHLIERSQVFNILRMMPKGAALHLHDIGIVTMDWLVRNVTYRPHCHICFTPRGIMQFRFAHPTSRPSEKCSKWILLEDYRKRVQNVTEFDDSLLRNFTLVTQHPEVIYTNQNVVWSKFETIFFTISGLIHYAPVFRDYVFRSMQEFYEDNVLYMEIRARLLPVYELSGEHHDEEWSVKTYQEVAQKFVETHPEFIGIKIIYSDHRSKDVAVIAESIRMAMGLRIKFPTVVAGFDLVGHEDTGHSLHDYKEALMIPAKDGVKLPYFFHAGETDWQGTSIDRNILDALMLNTTRIGHGFALSKHPAVRTYSWKKDIPIEVCPISNQVLKLVSDLRNHPVATLMATGHPMVISSDDPAMFGAKGLSYDFYEVFMGIGGMKADLRTLKQLAMNSIKYSTLLESEKNTFMEIWKKRWDKFIADVATK

SEQ ID NO: 579 - protein, 436 aa, synthetic construct
  REGION 1..436: note = human ADA2 V99-Q144del, mature numbering
IDETRAHLLLKEKMMRLGGRLVLNTKEELANERLMTLKIAEMKEAMRTLIFPPSMHFFQAKHLIERSQVFNILRMMPKGAALHLHDIGIVTMDWLVRNNVTEFDDSLLRNFTLVTQHPEVIYTNQNVVWSKFETIFFTISGLIHYAPVFRDYVFRSMQEFYEDNVLYMEIRARLLPVYELSGEHHDEEWSVKTYQEVAQKFVETHPEFIGIKIIYSDHRSKDVAVIAESIRMAMGLRIKFPTVVAGFDLVGHEDTGHSLHDYKEALMIPAKDGVKLPYFFHAGETDWQGTSIDRNILDALMLNTTRIGHGFALSKHPAVRTYSWKKDIPIEVCPISNQVLKLVSDLRNHPVATLMATGHPMVISSDDPAMFGAKGLSYDFYEVFMGIGGMKADLRTLKQLAMNSIKYSTLLESEKNTFMEIWKKRWDKFIADVATK

SEQ ID NO: 580 - protein, 10 aa, synthetic construct
  REGION 1..10: note = linker
GGGGSGGGGS

SEQ ID NO: 581 - protein, 441 aa, synthetic construct
  REGION 1..441: note = human ADA2 V99-Q144del->(GGGGS)n, maturenumbering, where n = 1 to 5
  REPEAT 99..103: note = occurring 1, 2, 3, 4 or 5 times
IDETRAHLLLKEKMMRLGGRLVLNTKEELANERLMTLKIAEMKEAMRTLIFPPSMHFFQAKHLIERSQVFNILRMMPKGAALHLHDIGIVTMDWLVRNGGGGSNVTEFDDSLLRNFTLVTQHPEVIYTNQNVVWSKFETIFFTISGLIHYAPVFRDYVFRSMQEFYEDNVLYMEIRARLLPVYELSGEHHDEEWSVKTYQEVAQKFVETHPEFIGIKIIYSDHRSKDVAVIAESIRMAMGLRIKFPTVVAGFDLVGHEDTGHSLHDYKEALMIPAKDGVKLPYFFHAGETDWQGTSIDRNILDALMLNTTRIGHGFALSKHPAVRTYSWKKDIPIEVCPISNQVLKLVSDLRNHPVATLMATGHPMVISSDDPAMFGAKGLSYDFYEVFMGIGGMKADLRTLKQLAMNSIKYSTLLESEKNTFMEIWKKRWDKFIADVATK

SEQ ID NO: 582 - protein, 444 aa, synthetic construct
  REGION 1..444: note = human ADA2 C105-T147del->(GGGGS)n, maturenumbering, where n = 1 to 5
  REPEAT 105..109: note = occurring 1, 2, 3, 4 or 5 times
IDETRAHLLLKEKMMRLGGRLVLNTKEELANERLMTLKIAEMKEAMRTLIFPPSMHFFQAKHLIERSQVFNILRMMPKGAALHLHDIGIVTMDWLVRNVTYRPHGGGGSEFDDSLLRNFTLVTQHPEVIYTNQNVVWSKFETIFFTISGLIHYAPVFRDYVFRSMQEFYEDNVLYMEIRARLLPVYELSGEHHDEEWSVKTYQEVAQKFVETHPEFIGIKIIYSDHRSKDVAVIAESIRMAMGLRIKFPTVVAGFDLVGHEDTGHSLHDYKEALMIPAKDGVKLPYFFHAGETDWQGTSIDRNILDALMLNTTRIGHGFALSKHPAVRTYSWKKDIPIEVCPISNQVLKLVSDLRNHPVATLMATGHPMVISSDDPAMFGAKGLSYDFYEVFMGIGGMKADLRTLKQLAMNSIKYSTLLESEKNTFMEIWKKRWDKFIADVATK

SEQ ID NO: 583 - protein, 441 aa, synthetic construct; identical to SEQ ID NO: 581
  REGION 1..441: note = human ADA2 V99-Q144del->(GGGGS)1, mature numbering

SEQ ID NO: 584 - protein, 446 aa, synthetic construct
  REGION 1..446: note = human ADA2 V99-Q144del->(GGGGS)2, mature numbering
IDETRAHLLLKEKMMRLGGRLVLNTKEELANERLMTLKIAEMKEAMRTLIFPPSMHFFQAKHLIERSQVFNILRMMPKGAALHLHDIGIVTMDWLVRNGGGGSGGGGSNVTEFDDSLLRNFTLVTQHPEVIYTNQNVVWSKFETIFFTISGLIHYAPVFRDYVFRSMQEFYEDNVLYMEIRARLLPVYELSGEHHDEEWSVKTYQEVAQKFVETHPEFIGIKIIYSDHRSKDVAVIAESIRMAMGLRIKFPTVVAGFDLVGHEDTGHSLHDYKEALMIPAKDGVKLPYFFHAGETDWQGTSIDRNILDALMLNTTRIGHGFALSKHPAVRTYSWKKDIPIEVCPISNQVLKLVSDLRNHPVATLMATGHPMVISSDDPAMFGAKGLSYDFYEVFMGIGGMKADLRTLKQLAMNSIKYSTLLESEKNTFMEIWKKRWDKFIADVATK

SEQ ID NO: 585 - protein, 451 aa, synthetic construct
  REGION 1..451: note = human ADA2 V99-Q144del->(GGGGS)3, mature numbering
IDETRAHLLLKEKMMRLGGRLVLNTKEELANERLMTLKIAEMKEAMRTLIFPPSMHFFQAKHLIERSQVFNILRMMPKGAALHLHDIGIVTMDWLVRNGGGGSGGGGSGGGGSNVTEFDDSLLRNFTLVTQHPEVIYTNQNVVWSKFETIFFTISGLIHYAPVFRDYVFRSMQEFYEDNVLYMEIRARLLPVYELSGEHHDEEWSVKTYQEVAQKFVETHPEFIGIKIIYSDHRSKDVAVIAESIRMAMGLRIKFPTVVAGFDLVGHEDTGHSLHDYKEALMIPAKDGVKLPYFFHAGETDWQGTSIDRNILDALMLNTTRIGHGFALSKHPAVRTYSWKKDIPIEVCPISNQVLKLVSDLRNHPVATLMATGHPMVISSDDPAMFGAKGLSYDFYEVFMGIGGMKADLRTLKQLAMNSIKYSTLLESEKNTFMEIWKKRWDKFIADVATK

SEQ ID NO: 586 - protein, 444 aa, synthetic construct; identical to SEQ ID NO: 582
  REGION 1..444: note = human ADA2 C105-T147del->(GGGGS)1, maturenumbering

SEQ ID NO: 587 - protein, 449 aa, synthetic construct
  REGION 1..449: note = human ADA2 C105-T147del->(GGGGS)2, maturenumbering
IDETRAHLLLKEKMMRLGGRLVLNTKEELANERLMTLKIAEMKEAMRTLIFPPSMHFFQAKHLIERSQVFNILRMMPKGAALHLHDIGIVTMDWLVRNVTYRPHGGGGSGGGGSEFDDSLLRNFTLVTQHPEVIYTNQNVVWSKFETIFFTISGLIHYAPVFRDYVFRSMQEFYEDNVLYMEIRARLLPVYELSGEHHDEEWSVKTYQEVAQKFVETHPEFIGIKIIYSDHRSKDVAVIAESIRMAMGLRIKFPTVVAGFDLVGHEDTGHSLHDYKEALMIPAKDGVKLPYFFHAGETDWQGTSIDRNILDALMLNTTRIGHGFALSKHPAVRTYSWKKDIPIEVCPISNQVLKLVSDLRNHPVATLMATGHPMVISSDDPAMFGAKGLSYDFYEVFMGIGGMKADLRTLKQLAMNSIKYSTLLESEKNTFMEIWKKRWDKFIADVATK

SEQ ID NO: 588 - protein, 454 aa, synthetic construct
  REGION 1..454: note = human ADA2 C105-T147del->(GGGGS)3, maturenumbering
IDETRAHLLLKEKMMRLGGRLVLNTKEELANERLMTLKIAEMKEAMRTLIFPPSMHFFQAKHLIERSQVFNILRMMPKGAALHLHDIGIVTMDWLVRNVTYRPHGGGGSGGGGSGGGGSEFDDSLLRNFTLVTQHPEVIYTNQNVVWSKFETIFFTISGLIHYAPVFRDYVFRSMQEFYEDNVLYMEIRARLLPVYELSGEHHDEEWSVKTYQEVAQKFVETHPEFIGIKIIYSDHRSKDVAVIAESIRMAMGLRIKFPTVVAGFDLVGHEDTGHSLHDYKEALMIPAKDGVKLPYFFHAGETDWQGTSIDRNILDALMLNTTRIGHGFALSKHPAVRTYSWKKDIPIEVCPISNQVLKLVSDLRNHPVATLMATGHPMVISSDDPAMFGAKGLSYDFYEVFMGIGGMKADLRTLKQLAMNSIKYSTLLESEKNTFMEIWKKRWDKFIADVATK

SEQ ID NO: 589 - protein, 441 aa, synthetic construct
  REGION 1..441: note = human ADA2 K371D/V99-Q144del->(GGGGS)1, maturenumbering
IDETRAHLLLKEKMMRLGGRLVLNTKEELANERLMTLKIAEMKEAMRTLIFPPSMHFFQAKHLIERSQVFNILRMMPKGAALHLHDIGIVTMDWLVRNGGGGSNVTEFDDSLLRNFTLVTQHPEVIYTNQNVVWSKFETIFFTISGLIHYAPVFRDYVFRSMQEFYEDNVLYMEIRARLLPVYELSGEHHDEEWSVKTYQEVAQKFVETHPEFIGIKIIYSDHRSKDVAVIAESIRMAMGLRIKFPTVVAGFDLVGHEDTGHSLHDYKEALMIPAKDGVKLPYFFHAGETDWQGTSIDRNILDALMLNTTRIGHGFALSKHPAVRTYSWDKDIPIEVCPISNQVLKLVSDLRNHPVATLMATGHPMVISSDDPAMFGAKGLSYDFYEVFMGIGGMKADLRTLKQLAMNSIKYSTLLESEKNTFMEIWKKRWDKFIADVATK

SEQ ID NO: 590 - protein, 446 aa, synthetic construct
  REGION 1..446: note = human ADA2 K371D/V99-Q144del->(GGGGS)2, maturenumbering
IDETRAHLLLKEKMMRLGGRLVLNTKEELANERLMTLKIAEMKEAMRTLIFPPSMHFFQAKHLIERSQVFNILRMMPKGAALHLHDIGIVTMDWLVRNGGGGSGGGGSNVTEFDDSLLRNFTLVTQHPEVIYTNQNVVWSKFETIFFTISGLIHYAPVFRDYVFRSMQEFYEDNVLYMEIRARLLPVYELSGEHHDEEWSVKTYQEVAQKFVETHPEFIGIKIIYSDHRSKDVAVIAESIRMAMGLRIKFPTVVAGFDLVGHEDTGHSLHDYKEALMIPAKDGVKLPYFFHAGETDWQGTSIDRNILDALMLNTTRIGHGFALSKHPAVRTYSWDKDIPIEVCPISNQVLKLVSDLRNHPVATLMATGHPMVISSDDPAMFGAKGLSYDFYEVFMGIGGMKADLRTLKQLAMNSIKYSTLLESEKNTFMEIWKKRWDKFIADVATK

SEQ ID NO: 591 - protein, 451 aa, synthetic construct
  REGION 1..451: note = human ADA2 K371D/V99-Q144del->(GGGGS)3, maturenumbering
IDETRAHLLLKEKMMRLGGRLVLNTKEELANERLMTLKIAEMKEAMRTLIFPPSMHFFQAKHLIERSQVFNILRMMPKGAALHLHDIGIVTMDWLVRNGGGGSGGGGSGGGGSNVTEFDDSLLRNFTLVTQHPEVIYTNQNVVWSKFETIFFTISGLIHYAPVFRDYVFRSMQEFYEDNVLYMEIRARLLPVYELSGEHHDEEWSVKTYQEVAQKFVETHPEFIGIKIIYSDHRSKDVAVIAESIRMAMGLRIKFPTVVAGFDLVGHEDTGHSLHDYKEALMIPAKDGVKLPYFFHAGETDWQGTSIDRNILDALMLNTTRIGHGFALSKHPAVRTYSWDKDIPIEVCPISNQVLKLVSDLRNHPVATLMATGHPMVISSDDPAMFGAKGLSYDFYEVFMGIGGMKADLRTLKQLAMNSIKYSTLLESEKNTFMEIWKKRWDKFIADVATK

SEQ ID NO: 592 - protein, 444 aa, synthetic construct
  REGION 1..444: note = human ADA2 K371D/C105-T147del->(GGGGS)1, maturenumbering
IDETRAHLLLKEKMMRLGGRLVLNTKEELANERLMTLKIAEMKEAMRTLIFPPSMHFFQAKHLIERSQVFNILRMMPKGAALHLHDIGIVTMDWLVRNVTYRPHGGGGSEFDDSLLRNFTLVTQHPEVIYTNQNVVWSKFETIFFTISGLIHYAPVFRDYVFRSMQEFYEDNVLYMEIRARLLPVYELSGEHHDEEWSVKTYQEVAQKFVETHPEFIGIKIIYSDHRSKDVAVIAESIRMAMGLRIKFPTVVAGFDLVGHEDTGHSLHDYKEALMIPAKDGVKLPYFFHAGETDWQGTSIDRNILDALMLNTTRIGHGFALSKHPAVRTYSWDKDIPIEVCPISNQVLKLVSDLRNHPVATLMATGHPMVISSDDPAMFGAKGLSYDFYEVFMGIGGMKADLRTLKQLAMNSIKYSTLLESEKNTFMEIWKKRWDKFIADVATK

SEQ ID NO: 593 - protein, 449 aa, synthetic construct
  REGION 1..449: note = human ADA2 K371D/C105-T147del->(GGGGS)2, maturenumbering
IDETRAHLLLKEKMMRLGGRLVLNTKEELANERLMTLKIAEMKEAMRTLIFPPSMHFFQAKHLIERSQVFNILRMMPKGAALHLHDIGIVTMDWLVRNVTYRPHGGGGSGGGGSEFDDSLLRNFTLVTQHPEVIYTNQNVVWSKFETIFFTISGLIHYAPVFRDYVFRSMQEFYEDNVLYMEIRARLLPVYELSGEHHDEEWSVKTYQEVAQKFVETHPEFIGIKIIYSDHRSKDVAVIAESIRMAMGLRIKFPTVVAGFDLVGHEDTGHSLHDYKEALMIPAKDGVKLPYFFHAGETDWQGTSIDRNILDALMLNTTRIGHGFALSKHPAVRTYSWDKDIPIEVCPISNQVLKLVSDLRNHPVATLMATGHPMVISSDDPAMFGAKGLSYDFYEVFMGIGGMKADLRTLKQLAMNSIKYSTLLESEKNTFMEIWKKRWDKFIADVATK

SEQ ID NO: 594 - protein, 454 aa, synthetic construct
  REGION 1..454: note = human ADA2 K371D/C105-T147del->(GGGGS)3, maturenumbering
IDETRAHLLLKEKMMRLGGRLVLNTKEELANERLMTLKIAEMKEAMRTLIFPPSMHFFQAKHLIERSQVFNILRMMPKGAALHLHDIGIVTMDWLVRNVTYRPHGGGGSGGGGSGGGGSEFDDSLLRNFTLVTQHPEVIYTNQNVVWSKFETIFFTISGLIHYAPVFRDYVFRSMQEFYEDNVLYMEIRARLLPVYELSGEHHDEEWSVKTYQEVAQKFVETHPEFIGIKIIYSDHRSKDVAVIAESIRMAMGLRIKFPTVVAGFDLVGHEDTGHSLHDYKEALMIPAKDGVKLPYFFHAGETDWQGTSIDRNILDALMLNTTRIGHGFALSKHPAVRTYSWDKDIPIEVCPISNQVLKLVSDLRNHPVATLMATGHPMVISSDDPAMFGAKGLSYDFYEVFMGIGGMKADLRTLKQLAMNSIKYSTLLESEKNTFMEIWKKRWDKFIADVATK

SEQ ID NO: 595 - protein, 6 aa, synthetic construct
  REGION 1..6: note = Linker Ser(Gly4Ser)n
  REPEAT 2..6: note = occurring 1, 2, 3, 4, 5 or more times
SGGGGS

SEQ ID NO: 596 - protein, 485 aa, synthetic construct
  REGION 1..485: note = human ADA2 R219Q/S262N/I1insNAS, mature numbering
NASIDETRAHLLLKEKMMRLGGRLVLNTKEELANERLMTLKIAEMKEAMRTLIFPPSMHFFQAKHLIERSQVFNILRMMPKGAALHLHDIGIVTMDWLVRNVTYRPHCHICFTPRGIMQFRFAHPTPRPSEKCSKWILLEDYRKRVQNVTEFDDSLLRNFTLVTQHPEVIYTNQNVVWSKFETIFFTISGLIHYAPVFRDYVFRSMQEFYEDNVLYMEIRAQLLPVYELSGEHHDEEWSVKTYQEVAQKFVETHPEFIGIKIIYNDHRSKDVAVIAESIRMAMGLRIKFPTVVAGFDLVGHEDTGHSLHDYKEALMIPAKDGVKLPYFFHAGETDWQGTSIDRNILDALMLNTTRIGHGFALSKHPAVRTYSWKKDIPIEVCPISNQVLKLVSDLRNHPVATLMATGHPMVISSDDPAMFGAKGLSYDFYEVFMGIGGMKADLRTLKQLAMNSIKYSTLLESEKNTFMEIWKKRWDKFIADVATK

SEQ ID NO: 597 - protein, 482 aa, synthetic construct
  REGION 1..482: note = human ADA2 R219Q/S262N/R20N/V22S, mature numbering
IDETRAHLLLKEKMMRLGGNLVLNTKEELANERLMTLKIAEMKEAMRTLIFPPSMHFFQAKHLIERSQVFNILRMMPKGAALHLHDIGIVTMDWLVRNVTYRPHCHICFTPRGIMQFRFAHPTPRPSEKCSKWILLEDYRKRVQNVTEFDDSLLRNFTLVTQHPEVIYTNQNVVWSKFETIFFTISGLIHYAPVFRDYVFRSMQEFYEDNVLYMEIRAQLLPVYELSGEHHDEEWSVKTYQEVAQKFVETHPEFIGIKIIYNDHRSKDVAVIAESIRMAMGLRIKFPTVVAGFDLVGHEDTGHSLHDYKEALMIPAKDGVKLPYFFHAGETDWQGTSIDRNILDALMLNTTRIGHGFALSKHPAVRTYSWKKDIPIEVCPISNQVLKLVSDLRNHPVATLMATGHPMVISSDDPAMFGAKGLSYDFYEVFMGIGGMKADLRTLKQLAMNSIKYSTLLESEKNTFMEIWKKRWDKFIADVATK

SEQ ID NO: 598 - protein, 482 aa, synthetic construct
  REGION 1..482: note = human ADA2 R219Q/S262N/K371N/D373S, maturenumbering
IDETRAHLLLKEKMMRLGGRLVLNTKEELANERLMTLKIAEMKEAMRTLIFPPSMHFFQAKHLIERSQVFNILRMMPKGAALHLHDIGIVTMDWLVRNVTYRPHCHICFTPRGIMQFRFAHPTPRPSEKCSKWILLEDYRKRVQNVTEFDDSLLRNFTLVTQHPEVIYTNQNVVWSKFETIFFTISGLIHYAPVFRDYVFRSMQEFYEDNVLYMEIRAQLLPVYELSGEHHDEEWSVKTYQEVAQKFVETHPEFIGIKIIYNDHRSKDVAVIAESIRMAMGLRIKFPTVVAGFDLVGHEDTGHSLHDYKEALMIPAKDGVKLPYFFHAGETDWQGTSIDRNILDALMLNTTRIGHGFALSKHPAVRTYSWNKSIPIEVCPISNQVLKLVSDLRNHPVATLMATGHPMVISSDDPAMFGAKGLSYDFYEVFMGIGGMKADLRTLKQLAMNSIKYSTLLESEKNTFMEIWKKRWDKFIADVATK

SEQ ID NO: 599 - protein, 482 aa, synthetic construct
  REGION 1..482: note = human ADA2 R219Q/S262N/K372N/I374S, maturenumbering
IDETRAHLLLKEKMMRLGGRLVLNTKEELANERLMTLKIAEMKEAMRTLIFPPSMHFFQAKHLIERSQVFNILRMMPKGAALHLHDIGIVTMDWLVRNVTYRPHCHICFTPRGIMQFRFAHPTPRPSEKCSKWILLEDYRKRVQNVTEFDDSLLRNFTLVTQHPEVIYTNQNVVWSKFETIFFTISGLIHYAPVFRDYVFRSMQEFYEDNVLYMEIRAQLLPVYELSGEHHDEEWSVKTYQEVAQKFVETHPEFIGIKIIYNDHRSKDVAVIAESIRMAMGLRIKFPTVVAGFDLVGHEDTGHSLHDYKEALMIPAKDGVKLPYFFHAGETDWQGTSIDRNILDALMLNTTRIGHGFALSKHPAVRTYSWKNDSPIEVCPISNQVLKLVSDLRNHPVATLMATGHPMVISSDDPAMFGAKGLSYDFYEVFMGIGGMKADLRTLKQLAMNSIKYSTLLESEKNTFMEIWKKRWDKFIADVATK

SEQ ID NO: 600 - protein, 482 aa, synthetic construct
  REGION 1..482: note = human ADA2 R219Q/S262N/T403N/H405S, maturenumbering
IDETRAHLLLKEKMMRLGGRLVLNTKEELANERLMTLKIAEMKEAMRTLIFPPSMHFFQAKHLIERSQVFNILRMMPKGAALHLHDIGIVTMDWLVRNVTYRPHCHICFTPRGIMQFRFAHPTPRPSEKCSKWILLEDYRKRVQNVTEFDDSLLRNFTLVTQHPEVIYTNQNVVWSKFETIFFTISGLIHYAPVFRDYVFRSMQEFYEDNVLYMEIRAQLLPVYELSGEHHDEEWSVKTYQEVAQKFVETHPEFIGIKIIYNDHRSKDVAVIAESIRMAMGLRIKFPTVVAGFDLVGHEDTGHSLHDYKEALMIPAKDGVKLPYFFHAGETDWQGTSIDRNILDALMLNTTRIGHGFALSKHPAVRTYSWKKDIPIEVCPISNQVLKLVSDLRNHPVATLMANGSPMVISSDDPAMFGAKGLSYDFYEVFMGIGGMKADLRTLKQLAMNSIKYSTLLESEKNTFMEIWKKRWDKFIADVATK

SEQ ID NO: 601 - protein, 482 aa, synthetic construct
  REGION 1..482: note = human ADA2 R219Q/S262N/G404N/P406S, maturenumbering
IDETRAHLLLKEKMMRLGGRLVLNTKEELANERLMTLKIAEMKEAMRTLIFPPSMHFFQAKHLIERSQVFNILRMMPKGAALHLHDIGIVTMDWLVRNVTYRPHCHICFTPRGIMQFRFAHPTPRPSEKCSKWILLEDYRKRVQNVTEFDDSLLRNFTLVTQHPEVIYTNQNVVWSKFETIFFTISGLIHYAPVFRDYVFRSMQEFYEDNVLYMEIRAQLLPVYELSGEHHDEEWSVKTYQEVAQKFVETHPEFIGIKIIYNDHRSKDVAVIAESIRMAMGLRIKFPTVVAGFDLVGHEDTGHSLHDYKEALMIPAKDGVKLPYFFHAGETDWQGTSIDRNILDALMLNTTRIGHGFALSKHPAVRTYSWKKDIPIEVCPISNQVLKLVSDLRNHPVATLMATNHSMVISSDDPAMFGAKGLSYDFYEVFMGIGGMKADLRTLKQLAMNSIKYSTLLESEKNTFMEIWKKRWDKFIADVATK

SEQ ID NO: 602 - protein, 454 aa, synthetic construct
  REGION 1..454: note = human ADA2 R219Q/S262N/C105-T147del->(Gly)15,mature numbering
IDETRAHLLLKEKMMRLGGRLVLNTKEELANERLMTLKIAEMKEAMRTLIFPPSMHFFQAKHLIERSQVFNILRMMPKGAALHLHDIGIVTMDWLVRNVTYRPHGGGGGGGGGGGGGGGEFDDSLLRNFTLVTQHPEVIYTNQNVVWSKFETIFFTISGLIHYAPVFRDYVFRSMQEFYEDNVLYMEIRAQLLPVYELSGEHHDEEWSVKTYQEVAQKFVETHPEFIGIKIIYNDHRSKDVAVIAESIRMAMGLRIKFPTVVAGFDLVGHEDTGHSLHDYKEALMIPAKDGVKLPYFFHAGETDWQGTSIDRNILDALMLNTTRIGHGFALSKHPAVRTYSWKKDIPIEVCPISNQVLKLVSDLRNHPVATLMATGHPMVISSDDPAMFGAKGLSYDFYEVFMGIGGMKADLRTLKQLAMNSIKYSTLLESEKNTFMEIWKKRWDKFIADVATK

SEQ ID NO: 603 - protein, 449 aa, synthetic construct
  REGION 1..449: note = human ADA2 R219Q/S262N/C105-T147del->(Gly)10,mature numbering
IDETRAHLLLKEKMMRLGGRLVLNTKEELANERLMTLKIAEMKEAMRTLIFPPSMHFFQAKHLIERSQVFNILRMMPKGAALHLHDIGIVTMDWLVRNVTYRPHGGGGGGGGGGEFDDSLLRNFTLVTQHPEVIYTNQNVVWSKFETIFFTISGLIHYAPVFRDYVFRSMQEFYEDNVLYMEIRAQLLPVYELSGEHHDEEWSVKTYQEVAQKFVETHPEFIGIKIIYNDHRSKDVAVIAESIRMAMGLRIKFPTVVAGFDLVGHEDTGHSLHDYKEALMIPAKDGVKLPYFFHAGETDWQGTSIDRNILDALMLNTTRIGHGFALSKHPAVRTYSWKKDIPIEVCPISNQVLKLVSDLRNHPVATLMATGHPMVISSDDPAMFGAKGLSYDFYEVFMGIGGMKADLRTLKQLAMNSIKYSTLLESEKNTFMEIWKKRWDKFIADVATK

SEQ ID NO: 604 - protein, 446 aa, synthetic construct
  REGION 1..446: note = human ADA2 R219Q/S262N/C105-T147del->(Gly)7,mature numbering
IDETRAHLLLKEKMMRLGGRLVLNTKEELANERLMTLKIAEMKEAMRTLIFPPSMHFFQAKHLIERSQVFNILRMMPKGAALHLHDIGIVTMDWLVRNVTYRPHGGGGGGGEFDDSLLRNFTLVTQHPEVIYTNQNVVWSKFETIFFTISGLIHYAPVFRDYVFRSMQEFYEDNVLYMEIRAQLLPVYELSGEHHDEEWSVKTYQEVAQKFVETHPEFIGIKIIYNDHRSKDVAVIAESIRMAMGLRIKFPTVVAGFDLVGHEDTGHSLHDYKEALMIPAKDGVKLPYFFHAGETDWQGTSIDRNILDALMLNTTRIGHGFALSKHPAVRTYSWKKDIPIEVCPISNQVLKLVSDLRNHPVATLMATGHPMVISSDDPAMFGAKGLSYDFYEVFMGIGGMKADLRTLKQLAMNSIKYSTLLESEKNTFMEIWKKRWDKFIADVATK

SEQ ID NO: 605 - protein, 444 aa, synthetic construct
  REGION 1..444: note = human ADA2 R219Q/S262N/C105-T147del->(Gly)5,mature numbering
IDETRAHLLLKEKMMRLGGRLVLNTKEELANERLMTLKIAEMKEAMRTLIFPPSMHFFQAKHLIERSQVFNILRMMPKGAALHLHDIGIVTMDWLVRNVTYRPHGGGGGEFDDSLLRNFTLVTQHPEVIYTNQNVVWSKFETIFFTISGLIHYAPVFRDYVFRSMQEFYEDNVLYMEIRAQLLPVYELSGEHHDEEWSVKTYQEVAQKFVETHPEFIGIKIIYNDHRSKDVAVIAESIRMAMGLRIKFPTVVAGFDLVGHEDTGHSLHDYKEALMIPAKDGVKLPYFFHAGETDWQGTSIDRNILDALMLNTTRIGHGFALSKHPAVRTYSWKKDIPIEVCPISNQVLKLVSDLRNHPVATLMATGHPMVISSDDPAMFGAKGLSYDFYEVFMGIGGMKADLRTLKQLAMNSIKYSTLLESEKNTFMEIWKKRWDKFIADVATK

SEQ ID NO: 606 - protein, 442 aa, synthetic construct
  REGION 1..442: note = human ADA2 R219Q/S262N/C105-T147del->(Gly)3,mature numbering
IDETRAHLLLKEKMMRLGGRLVLNTKEELANERLMTLKIAEMKEAMRTLIFPPSMHFFQAKHLIERSQVFNILRMMPKGAALHLHDIGIVTMDWLVRNVTYRPHGGGEFDDSLLRNFTLVTQHPEVIYTNQNVVWSKFETIFFTISGLIHYAPVFRDYVFRSMQEFYEDNVLYMEIRAQLLPVYELSGEHHDEEWSVKTYQEVAQKFVETHPEFIGIKIIYNDHRSKDVAVIAESIRMAMGLRIKFPTVVAGFDLVGHEDTGHSLHDYKEALMIPAKDGVKLPYFFHAGETDWQGTSIDRNILDALMLNTTRIGHGFALSKHPAVRTYSWKKDIPIEVCPISNQVLKLVSDLRNHPVATLMATGHPMVISSDDPAMFGAKGLSYDFYEVFMGIGGMKADLRTLKQLAMNSIKYSTLLESEKNTFMEIWKKRWDKFIADVATK

SEQ ID NO: 607 - protein, 482 aa, synthetic construct
  REGION 1..482: note = human ADA2 R219Q/S262N/R125N/P126A, maturenumbering
IDETRAHLLLKEKMMRLGGRLVLNTKEELANERLMTLKIAEMKEAMRTLIFPPSMHFFQAKHLIERSQVFNILRMMPKGAALHLHDIGIVTMDWLVRNVTYRPHCHICFTPRGIMQFRFAHPTPNASEKCSKWILLEDYRKRVQNVTEFDDSLLRNFTLVTQHPEVIYTNQNVVWSKFETIFFTISGLIHYAPVFRDYVFRSMQEFYEDNVLYMEIRAQLLPVYELSGEHHDEEWSVKTYQEVAQKFVETHPEFIGIKIIYNDHRSKDVAVIAESIRMAMGLRIKFPTVVAGFDLVGHEDTGHSLHDYKEALMIPAKDGVKLPYFFHAGETDWQGTSIDRNILDALMLNTTRIGHGFALSKHPAVRTYSWKKDIPIEVCPISNQVLKLVSDLRNHPVATLMATGHPMVISSDDPAMFGAKGLSYDFYEVFMGIGGMKADLRTLKQLAMNSIKYSTLLESEKNTFMEIWKKRWDKFIADVATK

SEQ ID NO: 608 - protein, 482 aa, synthetic construct
  REGION 1..482: note = human ADA2 R219Q/S262N/S127N/K129S, maturenumbering
IDETRAHLLLKEKMMRLGGRLVLNTKEELANERLMTLKIAEMKEAMRTLIFPPSMHFFQAKHLIERSQVFNILRMMPKGAALHLHDIGIVTMDWLVRNVTYRPHCHICFTPRGIMQFRFAHPTPRPNESCSKWILLEDYRKRVQNVTEFDDSLLRNFTLVTQHPEVIYTNQNVVWSKFETIFFTISGLIHYAPVFRDYVFRSMQEFYEDNVLYMEIRAQLLPVYELSGEHHDEEWSVKTYQEVAQKFVETHPEFIGIKIIYNDHRSKDVAVIAESIRMAMGLRIKFPTVVAGFDLVGHEDTGHSLHDYKEALMIPAKDGVKLPYFFHAGETDWQGTSIDRNILDALMLNTTRIGHGFALSKHPAVRTYSWKKDIPIEVCPISNQVLKLVSDLRNHPVATLMATGHPMVISSDDPAMFGAKGLSYDFYEVFMGIGGMKADLRTLKQLAMNSIKYSTLLESEKNTFMEIWKKRWDKFIADVATK

SEQ ID NO: 609 - protein, 482 aa, synthetic construct
  REGION 1..482: note = human ADA2 R219Q/S262N/P126N/E128T, maturenumbering
IDETRAHLLLKEKMMRLGGRLVLNTKEELANERLMTLKIAEMKEAMRTLIFPPSMHFFQAKHLIERSQVFNILRMMPKGAALHLHDIGIVTMDWLVRNVTYRPHCHICFTPRGIMQFRFAHPTPRNSTKCSKWILLEDYRKRVQNVTEFDDSLLRNFTLVTQHPEVIYTNQNVVWSKFETIFFTISGLIHYAPVFRDYVFRSMQEFYEDNVLYMEIRAQLLPVYELSGEHHDEEWSVKTYQEVAQKFVETHPEFIGIKIIYNDHRSKDVAVIAESIRMAMGLRIKFPTVVAGFDLVGHEDTGHSLHDYKEALMIPAKDGVKLPYFFHAGETDWQGTSIDRNILDALMLNTTRIGHGFALSKHPAVRTYSWKKDIPIEVCPISNQVLKLVSDLRNHPVATLMATGHPMVISSDDPAMFGAKGLSYDFYEVFMGIGGMKADLRTLKQLAMNSIKYSTLLESEKNTFMEIWKKRWDKFIADVATK

SEQ ID NO: 610 - protein, 482 aa, synthetic construct
  REGION 1..482: note = human ADA2 R219Q/S262N/R112N/I114T, maturenumbering
IDETRAHLLLKEKMMRLGGRLVLNTKEELANERLMTLKIAEMKEAMRTLIFPPSMHFFQAKHLIERSQVFNILRMMPKGAALHLHDIGIVTMDWLVRNVTYRPHCHICFTPNGTMQFRFAHPTPRPSEKCSKWILLEDYRKRVQNVTEFDDSLLRNFTLVTQHPEVIYTNQNVVWSKFETIFFTISGLIHYAPVFRDYVFRSMQEFYEDNVLYMEIRAQLLPVYELSGEHHDEEWSVKTYQEVAQKFVETHPEFIGIKIIYNDHRSKDVAVIAESIRMAMGLRIKFPTVVAGFDLVGHEDTGHSLHDYKEALMIPAKDGVKLPYFFHAGETDWQGTSIDRNILDALMLNTTRIGHGFALSKHPAVRTYSWKKDIPIEVCPISNQVLKLVSDLRNHPVATLMATGHPMVISSDDPAMFGAKGLSYDFYEVFMGIGGMKADLRTLKQLAMNSIKYSTLLESEKNTFMEIWKKRWDKFIADVATK

SEQ ID NO: 611 - protein, 482 aa, synthetic construct
  REGION 1..482: note = human ADA2 R219Q/S262N/I134N/L135C/L136T, maturenumbering
IDETRAHLLLKEKMMRLGGRLVLNTKEELANERLMTLKIAEMKEAMRTLIFPPSMHFFQAKHLIERSQVFNILRMMPKGAALHLHDIGIVTMDWLVRNVTYRPHCHICFTPRGIMQFRFAHPTPRPSEKCSKWNCTEDYRKRVQNVTEFDDSLLRNFTLVTQHPEVIYTNQNVVWSKFETIFFTISGLIHYAPVFRDYVFRSMQEFYEDNVLYMEIRAQLLPVYELSGEHHDEEWSVKTYQEVAQKFVETHPEFIGIKIIYNDHRSKDVAVIAESIRMAMGLRIKFPTVVAGFDLVGHEDTGHSLHDYKEALMIPAKDGVKLPYFFHAGETDWQGTSIDRNILDALMLNTTRIGHGFALSKHPAVRTYSWKKDIPIEVCPISNQVLKLVSDLRNHPVATLMATGHPMVISSDDPAMFGAKGLSYDFYEVFMGIGGMKADLRTLKQLAMNSIKYSTLLESEKNTFMEIWKKRWDKFIADVATK

SEQ ID NO: 612 - protein, 482 aa, synthetic construct
  REGION 1..482: note = human ADA2 R219Q/S262N/I134N/L135S/L136T, maturenumbering
IDETRAHLLLKEKMMRLGGRLVLNTKEELANERLMTLKIAEMKEAMRTLIFPPSMHFFQAKHLIERSQVFNILRMMPKGAALHLHDIGIVTMDWLVRNVTYRPHCHICFTPRGIMQFRFAHPTPRPSEKCSKWNSTEDYRKRVQNVTEFDDSLLRNFTLVTQHPEVIYTNQNVVWSKFETIFFTISGLIHYAPVFRDYVFRSMQEFYEDNVLYMEIRAQLLPVYELSGEHHDEEWSVKTYQEVAQKFVETHPEFIGIKIIYNDHRSKDVAVIAESIRMAMGLRIKFPTVVAGFDLVGHEDTGHSLHDYKEALMIPAKDGVKLPYFFHAGETDWQGTSIDRNILDALMLNTTRIGHGFALSKHPAVRTYSWKKDIPIEVCPISNQVLKLVSDLRNHPVATLMATGHPMVISSDDPAMFGAKGLSYDFYEVFMGIGGMKADLRTLKQLAMNSIKYSTLLESEKNTFMEIWKKRWDKFIADVATK

SEQ ID NO: 613 - protein, 482 aa, synthetic construct
  REGION 1..482: note = human ADA2 R219Q/S262N/R142N/Q144S, maturenumbering
IDETRAHLLLKEKMMRLGGRLVLNTKEELANERLMTLKIAEMKEAMRTLIFPPSMHFFQAKHLIERSQVFNILRMMPKGAALHLHDIGIVTMDWLVRNVTYRPHCHICFTPRGIMQFRFAHPTPRPSEKCSKWILLEDYRKNVSNVTEFDDSLLRNFTLVTQHPEVIYTNQNVVWSKFETIFFTISGLIHYAPVFRDYVFRSMQEFYEDNVLYMEIRAQLLPVYELSGEHHDEEWSVKTYQEVAQKFVETHPEFIGIKIIYNDHRSKDVAVIAESIRMAMGLRIKFPTVVAGFDLVGHEDTGHSLHDYKEALMIPAKDGVKLPYFFHAGETDWQGTSIDRNILDALMLNTTRIGHGFALSKHPAVRTYSWKKDIPIEVCPISNQVLKLVSDLRNHPVATLMATGHPMVISSDDPAMFGAKGLSYDFYEVFMGIGGMKADLRTLKQLAMNSIKYSTLLESEKNTFMEIWKKRWDKFIADVATK

SEQ ID NO: 614 - protein, 482 aa, synthetic construct
  REGION 1..482: note = human ADA2 R219Q/S262N/E137N/Y139T, maturenumbering
IDETRAHLLLKEKMMRLGGRLVLNTKEELANERLMTLKIAEMKEAMRTLIFPPSMHFFQAKHLIERSQVFNILRMMPKGAALHLHDIGIVTMDWLVRNVTYRPHCHICFTPRGIMQFRFAHPTPRPSEKCSKWILLNDTRKRVQNVTEFDDSLLRNFTLVTQHPEVIYTNQNVVWSKFETIFFTISGLIHYAPVFRDYVFRSMQEFYEDNVLYMEIRAQLLPVYELSGEHHDEEWSVKTYQEVAQKFVETHPEFIGIKIIYNDHRSKDVAVIAESIRMAMGLRIKFPTVVAGFDLVGHEDTGHSLHDYKEALMIPAKDGVKLPYFFHAGETDWQGTSIDRNILDALMLNTTRIGHGFALSKHPAVRTYSWKKDIPIEVCPISNQVLKLVSDLRNHPVATLMATGHPMVISSDDPAMFGAKGLSYDFYEVFMGIGGMKADLRTLKQLAMNSIKYSTLLESEKNTFMEIWKKRWDKFIADVATK

SEQ ID NO: 615 - protein, 482 aa, synthetic construct
  REGION 1..482: note = human ADA2 R219Q/S262N/P111N/G113S, maturenumbering
IDETRAHLLLKEKMMRLGGRLVLNTKEELANERLMTLKIAEMKEAMRTLIFPPSMHFFQAKHLIERSQVFNILRMMPKGAALHLHDIGIVTMDWLVRNVTYRPHCHICFTNRSIMQFRFAHPTPRPSEKCSKWILLEDYRKRVQNVTEFDDSLLRNFTLVTQHPEVIYTNQNVVWSKFETIFFTISGLIHYAPVFRDYVFRSMQEFYEDNVLYMEIRAQLLPVYELSGEHHDEEWSVKTYQEVAQKFVETHPEFIGIKIIYNDHRSKDVAVIAESIRMAMGLRIKFPTVVAGFDLVGHEDTGHSLHDYKEALMIPAKDGVKLPYFFHAGETDWQGTSIDRNILDALMLNTTRIGHGFALSKHPAVRTYSWKKDIPIEVCPISNQVLKLVSDLRNHPVATLMATGHPMVISSDDPAMFGAKGLSYDFYEVFMGIGGMKADLRTLKQLAMNSIKYSTLLESEKNTFMEIWKKRWDKFIADVATK

SEQ ID NO: 616 - protein, 482 aa, synthetic construct
  REGION 1..482: note = human ADA2 R219Q/S262N/F119S, mature numbering
IDETRAHLLLKEKMMRLGGRLVLNTKEELANERLMTLKIAEMKEAMRTLIFPPSMHFFQAKHLIERSQVFNILRMMPKGAALHLHDIGIVTMDWLVRNVTYRPHCHICFTPRGIMQFRSAHPTPRPSEKCSKWILLEDYRKRVQNVTEFDDSLLRNFTLVTQHPEVIYTNQNVVWSKFETIFFTISGLIHYAPVFRDYVFRSMQEFYEDNVLYMEIRAQLLPVYELSGEHHDEEWSVKTYQEVAQKFVETHPEFIGIKIIYNDHRSKDVAVIAESIRMAMGLRIKFPTVVAGFDLVGHEDTGHSLHDYKEALMIPAKDGVKLPYFFHAGETDWQGTSIDRNILDALMLNTTRIGHGFALSKHPAVRTYSWKKDIPIEVCPISNQVLKLVSDLRNHPVATLMATGHPMVISSDDPAMFGAKGLSYDFYEVFMGIGGMKADLRTLKQLAMNSIKYSTLLESEKNTFMEIWKKRWDKFIADVATK

SEQ ID NO: 617 - protein, 482 aa, synthetic construct
  REGION 1..482: note = human ADA2 R219Q/S262N/F119K, mature numbering
IDETRAHLLLKEKMMRLGGRLVLNTKEELANERLMTLKIAEMKEAMRTLIFPPSMHFFQAKHLIERSQVFNILRMMPKGAALHLHDIGIVTMDWLVRNVTYRPHCHICFTPRGIMQFRKAHPTPRPSEKCSKWILLEDYRKRVQNVTEFDDSLLRNFTLVTQHPEVIYTNQNVVWSKFETIFFTISGLIHYAPVFRDYVFRSMQEFYEDNVLYMEIRAQLLPVYELSGEHHDEEWSVKTYQEVAQKFVETHPEFIGIKIIYNDHRSKDVAVIAESIRMAMGLRIKFPTVVAGFDLVGHEDTGHSLHDYKEALMIPAKDGVKLPYFFHAGETDWQGTSIDRNILDALMLNTTRIGHGFALSKHPAVRTYSWKKDIPIEVCPISNQVLKLVSDLRNHPVATLMATGHPMVISSDDPAMFGAKGLSYDFYEVFMGIGGMKADLRTLKQLAMNSIKYSTLLESEKNTFMEIWKKRWDKFIADVATK

SEQ ID NO: 618 - protein, 482 aa, synthetic construct
  REGION 1..482: note = human ADA2 R219Q/S262N/Y224R, mature numbering
IDETRAHLLLKEKMMRLGGRLVLNTKEELANERLMTLKIAEMKEAMRTLIFPPSMHFFQAKHLIERSQVFNILRMMPKGAALHLHDIGIVTMDWLVRNVTYRPHCHICFTPRGIMQFRFAHPTPRPSEKCSKWILLEDYRKRVQNVTEFDDSLLRNFTLVTQHPEVIYTNQNVVWSKFETIFFTISGLIHYAPVFRDYVFRSMQEFYEDNVLYMEIRAQLLPVRELSGEHHDEEWSVKTYQEVAQKFVETHPEFIGIKIIYNDHRSKDVAVIAESIRMAMGLRIKFPTVVAGFDLVGHEDTGHSLHDYKEALMIPAKDGVKLPYFFHAGETDWQGTSIDRNILDALMLNTTRIGHGFALSKHPAVRTYSWKKDIPIEVCPISNQVLKLVSDLRNHPVATLMATGHPMVISSDDPAMFGAKGLSYDFYEVFMGIGGMKADLRTLKQLAMNSIKYSTLLESEKNTFMEIWKKRWDKFIADVATK

SEQ ID NO: 619 - protein, 482 aa, synthetic construct
  REGION 1..482: note = human ADA2 R219Q/S262N/Y224N, mature numbering
IDETRAHLLLKEKMMRLGGRLVLNTKEELANERLMTLKIAEMKEAMRTLIFPPSMHFFQAKHLIERSQVFNILRMMPKGAALHLHDIGIVTMDWLVRNVTYRPHCHICFTPRGIMQFRFAHPTPRPSEKCSKWILLEDYRKRVQNVTEFDDSLLRNFTLVTQHPEVIYTNQNVVWSKFETIFFTISGLIHYAPVFRDYVFRSMQEFYEDNVLYMEIRAQLLPVNELSGEHHDEEWSVKTYQEVAQKFVETHPEFIGIKIIYNDHRSKDVAVIAESIRMAMGLRIKFPTVVAGFDLVGHEDTGHSLHDYKEALMIPAKDGVKLPYFFHAGETDWQGTSIDRNILDALMLNTTRIGHGFALSKHPAVRTYSWKKDIPIEVCPISNQVLKLVSDLRNHPVATLMATGHPMVISSDDPAMFGAKGLSYDFYEVFMGIGGMKADLRTLKQLAMNSIKYSTLLESEKNTFMEIWKKRWDKFIADVATK

SEQ ID NO: 620 - protein, 482 aa, synthetic construct
  REGION 1..482: note = human ADA2 R219Q/S262N/Y191S, mature numbering
IDETRAHLLLKEKMMRLGGRLVLNTKEELANERLMTLKIAEMKEAMRTLIFPPSMHFFQAKHLIERSQVFNILRMMPKGAALHLHDIGIVTMDWLVRNVTYRPHCHICFTPRGIMQFRFAHPTPRPSEKCSKWILLEDYRKRVQNVTEFDDSLLRNFTLVTQHPEVIYTNQNVVWSKFETIFFTISGLIHSAPVFRDYVFRSMQEFYEDNVLYMEIRAQLLPVYELSGEHHDEEWSVKTYQEVAQKFVETHPEFIGIKIIYNDHRSKDVAVIAESIRMAMGLRIKFPTVVAGFDLVGHEDTGHSLHDYKEALMIPAKDGVKLPYFFHAGETDWQGTSIDRNILDALMLNTTRIGHGFALSKHPAVRTYSWKKDIPIEVCPISNQVLKLVSDLRNHPVATLMATGHPMVISSDDPAMFGAKGLSYDFYEVFMGIGGMKADLRTLKQLAMNSIKYSTLLESEKNTFMEIWKKRWDKFIADVATK

SEQ ID NO: 621 - protein, 482 aa, synthetic construct
  REGION 1..482: note = human ADA2 R219Q/S262N/Y191D, mature numbering
IDETRAHLLLKEKMMRLGGRLVLNTKEELANERLMTLKIAEMKEAMRTLIFPPSMHFFQAKHLIERSQVFNILRMMPKGAALHLHDIGIVTMDWLVRNVTYRPHCHICFTPRGIMQFRFAHPTPRPSEKCSKWILLEDYRKRVQNVTEFDDSLLRNFTLVTQHPEVIYTNQNVVWSKFETIFFTISGLIHDAPVFRDYVFRSMQEFYEDNVLYMEIRAQLLPVYELSGEHHDEEWSVKTYQEVAQKFVETHPEFIGIKIIYNDHRSKDVAVIAESIRMAMGLRIKFPTVVAGFDLVGHEDTGHSLHDYKEALMIPAKDGVKLPYFFHAGETDWQGTSIDRNILDALMLNTTRIGHGFALSKHPAVRTYSWKKDIPIEVCPISNQVLKLVSDLRNHPVATLMATGHPMVISSDDPAMFGAKGLSYDFYEVFMGIGGMKADLRTLKQLAMNSIKYSTLLESEKNTFMEIWKKRWDKFIADVATK

SEQ ID NO: 622 - protein, 482 aa, synthetic construct
  REGION 1..482: note = human ADA2 R219Q/S262N/F183K, mature numbering
IDETRAHLLLKEKMMRLGGRLVLNTKEELANERLMTLKIAEMKEAMRTLIFPPSMHFFQAKHLIERSQVFNILRMMPKGAALHLHDIGIVTMDWLVRNVTYRPHCHICFTPRGIMQFRFAHPTPRPSEKCSKWILLEDYRKRVQNVTEFDDSLLRNFTLVTQHPEVIYTNQNVVWSKFETIFKTISGLIHYAPVFRDYVFRSMQEFYEDNVLYMEIRAQLLPVYELSGEHHDEEWSVKTYQEVAQKFVETHPEFIGIKIIYNDHRSKDVAVIAESIRMAMGLRIKFPTVVAGFDLVGHEDTGHSLHDYKEALMIPAKDGVKLPYFFHAGETDWQGTSIDRNILDALMLNTTRIGHGFALSKHPAVRTYSWKKDIPIEVCPISNQVLKLVSDLRNHPVATLMATGHPMVISSDDPAMFGAKGLSYDFYEVFMGIGGMKADLRTLKQLAMNSIKYSTLLESEKNTFMEIWKKRWDKFIADVATK

SEQ ID NO: 623 - protein, 482 aa, synthetic construct
  REGION 1..482: note = human ADA2 R219Q/S262N/Y191D/Y224R, maturenumbering
IDETRAHLLLKEKMMRLGGRLVLNTKEELANERLMTLKIAEMKEAMRTLIFPPSMHFFQAKHLIERSQVFNILRMMPKGAALHLHDIGIVTMDWLVRNVTYRPHCHICFTPRGIMQFRFAHPTPRPSEKCSKWILLEDYRKRVQNVTEFDDSLLRNFTLVTQHPEVIYTNQNVVWSKFETIFFTISGLIHDAPVFRDYVFRSMQEFYEDNVLYMEIRAQLLPVRELSGEHHDEEWSVKTYQEVAQKFVETHPEFIGIKIIYNDHRSKDVAVIAESIRMAMGLRIKFPTVVAGFDLVGHEDTGHSLHDYKEALMIPAKDGVKLPYFFHAGETDWQGTSIDRNILDALMLNTTRIGHGFALSKHPAVRTYSWKKDIPIEVCPISNQVLKLVSDLRNHPVATLMATGHPMVISSDDPAMFGAKGLSYDFYEVFMGIGGMKADLRTLKQLAMNSIKYSTLLESEKNTFMEIWKKRWDKFIADVATK

SEQ ID NO: 624 - protein, 482 aa, synthetic construct
  REGION 1..482: note = human ADA2 R219Q/S262N/F109S, mature numbering
IDETRAHLLLKEKMMRLGGRLVLNTKEELANERLMTLKIAEMKEAMRTLIFPPSMHFFQAKHLIERSQVFNILRMMPKGAALHLHDIGIVTMDWLVRNVTYRPHCHICSTPRGIMQFRFAHPTPRPSEKCSKWILLEDYRKRVQNVTEFDDSLLRNFTLVTQHPEVIYTNQNVVWSKFETIFFTISGLIHYAPVFRDYVFRSMQEFYEDNVLYMEIRAQLLPVYELSGEHHDEEWSVKTYQEVAQKFVETHPEFIGIKIIYNDHRSKDVAVIAESIRMAMGLRIKFPTVVAGFDLVGHEDTGHSLHDYKEALMIPAKDGVKLPYFFHAGETDWQGTSIDRNILDALMLNTTRIGHGFALSKHPAVRTYSWKKDIPIEVCPISNQVLKLVSDLRNHPVATLMATGHPMVISSDDPAMFGAKGLSYDFYEVFMGIGGMKADLRTLKQLAMNSIKYSTLLESEKNTFMEIWKKRWDKFIADVATK

SEQ ID NO: 625 - protein, 482 aa, synthetic construct
  REGION 1..482: note = human ADA2 R219Q/S262N/F109A, mature numbering
IDETRAHLLLKEKMMRLGGRLVLNTKEELANERLMTLKIAEMKEAMRTLIFPPSMHFFQAKHLIERSQVFNILRMMPKGAALHLHDIGIVTMDWLVRNVTYRPHCHICATPRGIMQFRFAHPTPRPSEKCSKWILLEDYRKRVQNVTEFDDSLLRNFTLVTQHPEVIYTNQNVVWSKFETIFFTISGLIHYAPVFRDYVFRSMQEFYEDNVLYMEIRAQLLPVYELSGEHHDEEWSVKTYQEVAQKFVETHPEFIGIKIIYNDHRSKDVAVIAESIRMAMGLRIKFPTVVAGFDLVGHEDTGHSLHDYKEALMIPAKDGVKLPYFFHAGETDWQGTSIDRNILDALMLNTTRIGHGFALSKHPAVRTYSWKKDIPIEVCPISNQVLKLVSDLRNHPVATLMATGHPMVISSDDPAMFGAKGLSYDFYEVFMGIGGMKADLRTLKQLAMNSIKYSTLLESEKNTFMEIWKKRWDKFIADVATK

SEQ ID NO: 626 - protein, 482 aa, synthetic construct
  REGION 1..482: note = human ADA2 R219Q/S262N/R118D, mature numbering
IDETRAHLLLKEKMMRLGGRLVLNTKEELANERLMTLKIAEMKEAMRTLIFPPSMHFFQAKHLIERSQVFNILRMMPKGAALHLHDIGIVTMDWLVRNVTYRPHCHICFTPRGIMQFDFAHPTPRPSEKCSKWILLEDYRKRVQNVTEFDDSLLRNFTLVTQHPEVIYTNQNVVWSKFETIFFTISGLIHYAPVFRDYVFRSMQEFYEDNVLYMEIRAQLLPVYELSGEHHDEEWSVKTYQEVAQKFVETHPEFIGIKIIYNDHRSKDVAVIAESIRMAMGLRIKFPTVVAGFDLVGHEDTGHSLHDYKEALMIPAKDGVKLPYFFHAGETDWQGTSIDRNILDALMLNTTRIGHGFALSKHPAVRTYSWKKDIPIEVCPISNQVLKLVSDLRNHPVATLMATGHPMVISSDDPAMFGAKGLSYDFYEVFMGIGGMKADLRTLKQLAMNSIKYSTLLESEKNTFMEIWKKRWDKFIADVATK

SEQ ID NO: 627 - protein, 482 aa, synthetic construct
  REGION 1..482: note = human ADA2 R219Q/S262N/R118A, mature numbering
IDETRAHLLLKEKMMRLGGRLVLNTKEELANERLMTLKIAEMKEAMRTLIFPPSMHFFQAKHLIERSQVFNILRMMPKGAALHLHDIGIVTMDWLVRNVTYRPHCHICFTPRGIMQFAFAHPTPRPSEKCSKWILLEDYRKRVQNVTEFDDSLLRNFTLVTQHPEVIYTNQNVVWSKFETIFFTISGLIHYAPVFRDYVFRSMQEFYEDNVLYMEIRAQLLPVYELSGEHHDEEWSVKTYQEVAQKFVETHPEFIGIKIIYNDHRSKDVAVIAESIRMAMGLRIKFPTVVAGFDLVGHEDTGHSLHDYKEALMIPAKDGVKLPYFFHAGETDWQGTSIDRNILDALMLNTTRIGHGFALSKHPAVRTYSWKKDIPIEVCPISNQVLKLVSDLRNHPVATLMATGHPMVISSDDPAMFGAKGLSYDFYEVFMGIGGMKADLRTLKQLAMNSIKYSTLLESEKNTFMEIWKKRWDKFIADVATK

SEQ ID NO: 628 - protein, 482 aa, synthetic construct
  REGION 1..482: note = human ADA2 R219Q/S262N/Y139T, mature numbering
IDETRAHLLLKEKMMRLGGRLVLNTKEELANERLMTLKIAEMKEAMRTLIFPPSMHFFQAKHLIERSQVFNILRMMPKGAALHLHDIGIVTMDWLVRNVTYRPHCHICFTPRGIMQFRFAHPTPRPSEKCSKWILLEDTRKRVQNVTEFDDSLLRNFTLVTQHPEVIYTNQNVVWSKFETIFFTISGLIHYAPVFRDYVFRSMQEFYEDNVLYMEIRAQLLPVYELSGEHHDEEWSVKTYQEVAQKFVETHPEFIGIKIIYNDHRSKDVAVIAESIRMAMGLRIKFPTVVAGFDLVGHEDTGHSLHDYKEALMIPAKDGVKLPYFFHAGETDWQGTSIDRNILDALMLNTTRIGHGFALSKHPAVRTYSWKKDIPIEVCPISNQVLKLVSDLRNHPVATLMATGHPMVISSDDPAMFGAKGLSYDFYEVFMGIGGMKADLRTLKQLAMNSIKYSTLLESEKNTFMEIWKKRWDKFIADVATK

SEQ ID NO: 629 - protein, 482 aa, synthetic construct
  REGION 1..482: note = human ADA2 R219Q/S262N/Y139A, mature numbering
IDETRAHLLLKEKMMRLGGRLVLNTKEELANERLMTLKIAEMKEAMRTLIFPPSMHFFQAKHLIERSQVFNILRMMPKGAALHLHDIGIVTMDWLVRNVTYRPHCHICFTPRGIMQFRFAHPTPRPSEKCSKWILLEDARKRVQNVTEFDDSLLRNFTLVTQHPEVIYTNQNVVWSKFETIFFTISGLIHYAPVFRDYVFRSMQEFYEDNVLYMEIRAQLLPVYELSGEHHDEEWSVKTYQEVAQKFVETHPEFIGIKIIYNDHRSKDVAVIAESIRMAMGLRIKFPTVVAGFDLVGHEDTGHSLHDYKEALMIPAKDGVKLPYFFHAGETDWQGTSIDRNILDALMLNTTRIGHGFALSKHPAVRTYSWKKDIPIEVCPISNQVLKLVSDLRNHPVATLMATGHPMVISSDDPAMFGAKGLSYDFYEVFMGIGGMKADLRTLKQLAMNSIKYSTLLESEKNTFMEIWKKRWDKFIADVATK

SEQ ID NO: 630 - protein, 482 aa, synthetic construct
  REGION 1..482: note = human ADA2 R219Q/S262N/W133S, mature numbering
IDETRAHLLLKEKMMRLGGRLVLNTKEELANERLMTLKIAEMKEAMRTLIFPPSMHFFQAKHLIERSQVFNILRMMPKGAALHLHDIGIVTMDWLVRNVTYRPHCHICFTPRGIMQFRFAHPTPRPSEKCSKSILLEDYRKRVQNVTEFDDSLLRNFTLVTQHPEVIYTNQNVVWSKFETIFFTISGLIHYAPVFRDYVFRSMQEFYEDNVLYMEIRAQLLPVYELSGEHHDEEWSVKTYQEVAQKFVETHPEFIGIKIIYNDHRSKDVAVIAESIRMAMGLRIKFPTVVAGFDLVGHEDTGHSLHDYKEALMIPAKDGVKLPYFFHAGETDWQGTSIDRNILDALMLNTTRIGHGFALSKHPAVRTYSWKKDIPIEVCPISNQVLKLVSDLRNHPVATLMATGHPMVISSDDPAMFGAKGLSYDFYEVFMGIGGMKADLRTLKQLAMNSIKYSTLLESEKNTFMEIWKKRWDKFIADVATK

SEQ ID NO: 631 - protein, 482 aa, synthetic construct
  REGION 1..482: note = human ADA2 R219Q/S262N/W133T, mature numbering
IDETRAHLLLKEKMMRLGGRLVLNTKEELANERLMTLKIAEMKEAMRTLIFPPSMHFFQAKHLIERSQVFNILRMMPKGAALHLHDIGIVTMDWLVRNVTYRPHCHICFTPRGIMQFRFAHPTPRPSEKCSKTILLEDYRKRVQNVTEFDDSLLRNFTLVTQHPEVIYTNQNVVWSKFETIFFTISGLIHYAPVFRDYVFRSMQEFYEDNVLYMEIRAQLLPVYELSGEHHDEEWSVKTYQEVAQKFVETHPEFIGIKIIYNDHRSKDVAVIAESIRMAMGLRIKFPTVVAGFDLVGHEDTGHSLHDYKEALMIPAKDGVKLPYFFHAGETDWQGTSIDRNILDALMLNTTRIGHGFALSKHPAVRTYSWKKDIPIEVCPISNQVLKLVSDLRNHPVATLMATGHPMVISSDDPAMFGAKGLSYDFYEVFMGIGGMKADLRTLKQLAMNSIKYSTLLESEKNTFMEIWKKRWDKFIADVATK

SEQ ID NO: 632 - protein, 482 aa, synthetic construct
  REGION 1..482: note = human ADA2 R219Q/S262N/P124A, mature numbering
IDETRAHLLLKEKMMRLGGRLVLNTKEELANERLMTLKIAEMKEAMRTLIFPPSMHFFQAKHLIERSQVFNILRMMPKGAALHLHDIGIVTMDWLVRNVTYRPHCHICFTPRGIMQFRFAHPTARPSEKCSKWILLEDYRKRVQNVTEFDDSLLRNFTLVTQHPEVIYTNQNVVWSKFETIFFTISGLIHYAPVFRDYVFRSMQEFYEDNVLYMEIRAQLLPVYELSGEHHDEEWSVKTYQEVAQKFVETHPEFIGIKIIYNDHRSKDVAVIAESIRMAMGLRIKFPTVVAGFDLVGHEDTGHSLHDYKEALMIPAKDGVKLPYFFHAGETDWQGTSIDRNILDALMLNTTRIGHGFALSKHPAVRTYSWKKDIPIEVCPISNQVLKLVSDLRNHPVATLMATGHPMVISSDDPAMFGAKGLSYDFYEVFMGIGGMKADLRTLKQLAMNSIKYSTLLESEKNTFMEIWKKRWDKFIADVATK

SEQ ID NO: 633 - protein, 482 aa, synthetic construct
  REGION 1..482: note = human ADA2 R219Q/S262N/P124S, mature numbering
IDETRAHLLLKEKMMRLGGRLVLNTKEELANERLMTLKIAEMKEAMRTLIFPPSMHFFQAKHLIERSQVFNILRMMPKGAALHLHDIGIVTMDWLVRNVTYRPHCHICFTPRGIMQFRFAHPTSRPSEKCSKWILLEDYRKRVQNVTEFDDSLLRNFTLVTQHPEVIYTNQNVVWSKFETIFFTISGLIHYAPVFRDYVFRSMQEFYEDNVLYMEIRAQLLPVYELSGEHHDEEWSVKTYQEVAQKFVETHPEFIGIKIIYNDHRSKDVAVIAESIRMAMGLRIKFPTVVAGFDLVGHEDTGHSLHDYKEALMIPAKDGVKLPYFFHAGETDWQGTSIDRNILDALMLNTTRIGHGFALSKHPAVRTYSWKKDIPIEVCPISNQVLKLVSDLRNHPVATLMATGHPMVISSDDPAMFGAKGLSYDFYEVFMGIGGMKADLRTLKQLAMNSIKYSTLLESEKNTFMEIWKKRWDKFIADVATK

SEQ ID NO: 634 - protein, 441 aa, synthetic construct
  REGION 1..441: note = human ADA2 R219Q/S262N/V99-Q144del->(GGGGS)1,mature numbering
IDETRAHLLLKEKMMRLGGRLVLNTKEELANERLMTLKIAEMKEAMRTLIFPPSMHFFQAKHLIERSQVFNILRMMPKGAALHLHDIGIVTMDWLVRNGGGGSNVTEFDDSLLRNFTLVTQHPEVIYTNQNVVWSKFETIFFTISGLIHYAPVFRDYVFRSMQEFYEDNVLYMEIRAQLLPVYELSGEHHDEEWSVKTYQEVAQKFVETHPEFIGIKIIYNDHRSKDVAVIAESIRMAMGLRIKFPTVVAGFDLVGHEDTGHSLHDYKEALMIPAKDGVKLPYFFHAGETDWQGTSIDRNILDALMLNTTRIGHGFALSKHPAVRTYSWKKDIPIEVCPISNQVLKLVSDLRNHPVATLMATGHPMVISSDDPAMFGAKGLSYDFYEVFMGIGGMKADLRTLKQLAMNSIKYSTLLESEKNTFMEIWKKRWDKFIADVATK

SEQ ID NO: 635 - protein, 446 aa, synthetic construct
  REGION 1..446: note = human ADA2 R219Q/S262N/V99-Q144del->(GGGGS)2,mature numbering
IDETRAHLLLKEKMMRLGGRLVLNTKEELANERLMTLKIAEMKEAMRTLIFPPSMHFFQAKHLIERSQVFNILRMMPKGAALHLHDIGIVTMDWLVRNGGGGSGGGGSNVTEFDDSLLRNFTLVTQHPEVIYTNQNVVWSKFETIFFTISGLIHYAPVFRDYVFRSMQEFYEDNVLYMEIRAQLLPVYELSGEHHDEEWSVKTYQEVAQKFVETHPEFIGIKIIYNDHRSKDVAVIAESIRMAMGLRIKFPTVVAGFDLVGHEDTGHSLHDYKEALMIPAKDGVKLPYFFHAGETDWQGTSIDRNILDALMLNTTRIGHGFALSKHPAVRTYSWKKDIPIEVCPISNQVLKLVSDLRNHPVATLMATGHPMVISSDDPAMFGAKGLSYDFYEVFMGIGGMKADLRTLKQLAMNSIKYSTLLESEKNTFMEIWKKRWDKFIADVATK

SEQ ID NO: 636 - protein, 451 aa, synthetic construct
  REGION 1..451: note = human ADA2 R219Q/S262N/V99-Q144del->(GGGGS)3,mature numbering
IDETRAHLLLKEKMMRLGGRLVLNTKEELANERLMTLKIAEMKEAMRTLIFPPSMHFFQAKHLIERSQVFNILRMMPKGAALHLHDIGIVTMDWLVRNGGGGSGGGGSGGGGSNVTEFDDSLLRNFTLVTQHPEVIYTNQNVVWSKFETIFFTISGLIHYAPVFRDYVFRSMQEFYEDNVLYMEIRAQLLPVYELSGEHHDEEWSVKTYQEVAQKFVETHPEFIGIKIIYNDHRSKDVAVIAESIRMAMGLRIKFPTVVAGFDLVGHEDTGHSLHDYKEALMIPAKDGVKLPYFFHAGETDWQGTSIDRNILDALMLNTTRIGHGFALSKHPAVRTYSWKKDIPIEVCPISNQVLKLVSDLRNHPVATLMATGHPMVISSDDPAMFGAKGLSYDFYEVFMGIGGMKADLRTLKQLAMNSIKYSTLLESEKNTFMEIWKKRWDKFIADVATK

SEQ ID NO: 637 - protein, 444 aa, synthetic construct
  REGION 1..444: note = human ADA2 R219Q/S262N/C105-T147del->(GGGGS)1,mature numbering
IDETRAHLLLKEKMMRLGGRLVLNTKEELANERLMTLKIAEMKEAMRTLIFPPSMHFFQAKHLIERSQVFNILRMMPKGAALHLHDIGIVTMDWLVRNVTYRPHGGGGSEFDDSLLRNFTLVTQHPEVIYTNQNVVWSKFETIFFTISGLIHYAPVFRDYVFRSMQEFYEDNVLYMEIRAQLLPVYELSGEHHDEEWSVKTYQEVAQKFVETHPEFIGIKIIYNDHRSKDVAVIAESIRMAMGLRIKFPTVVAGFDLVGHEDTGHSLHDYKEALMIPAKDGVKLPYFFHAGETDWQGTSIDRNILDALMLNTTRIGHGFALSKHPAVRTYSWKKDIPIEVCPISNQVLKLVSDLRNHPVATLMATGHPMVISSDDPAMFGAKGLSYDFYEVFMGIGGMKADLRTLKQLAMNSIKYSTLLESEKNTFMEIWKKRWDKFIADVATK

SEQ ID NO: 638 - protein, 449 aa, synthetic construct
  REGION 1..449: note = human ADA2 R219Q/S262N/C105-T147del->(GGGGS)2,mature numbering
IDETRAHLLLKEKMMRLGGRLVLNTKEELANERLMTLKIAEMKEAMRTLIFPPSMHFFQAKHLIERSQVFNILRMMPKGAALHLHDIGIVTMDWLVRNVTYRPHGGGGSGGGGSEFDDSLLRNFTLVTQHPEVIYTNQNVVWSKFETIFFTISGLIHYAPVFRDYVFRSMQEFYEDNVLYMEIRAQLLPVYELSGEHHDEEWSVKTYQEVAQKFVETHPEFIGIKIIYNDHRSKDVAVIAESIRMAMGLRIKFPTVVAGFDLVGHEDTGHSLHDYKEALMIPAKDGVKLPYFFHAGETDWQGTSIDRNILDALMLNTTRIGHGFALSKHPAVRTYSWKKDIPIEVCPISNQVLKLVSDLRNHPVATLMATGHPMVISSDDPAMFGAKGLSYDFYEVFMGIGGMKADLRTLKQLAMNSIKYSTLLESEKNTFMEIWKKRWDKFIADVATK

SEQ ID NO: 639 - protein, 454 aa, synthetic construct
  REGION 1..454: note = human ADA2 R219Q/S262N/C105-T147del->(GGGGS)3,mature numbering
IDETRAHLLLKEKMMRLGGRLVLNTKEELANERLMTLKIAEMKEAMRTLIFPPSMHFFQAKHLIERSQVFNILRMMPKGAALHLHDIGIVTMDWLVRNVTYRPHGGGGSGGGGSGGGGSEFDDSLLRNFTLVTQHPEVIYTNQNVVWSKFETIFFTISGLIHYAPVFRDYVFRSMQEFYEDNVLYMEIRAQLLPVYELSGEHHDEEWSVKTYQEVAQKFVETHPEFIGIKIIYNDHRSKDVAVIAESIRMAMGLRIKFPTVVAGFDLVGHEDTGHSLHDYKEALMIPAKDGVKLPYFFHAGETDWQGTSIDRNILDALMLNTTRIGHGFALSKHPAVRTYSWKKDIPIEVCPISNQVLKLVSDLRNHPVATLMATGHPMVISSDDPAMFGAKGLSYDFYEVFMGIGGMKADLRTLKQLAMNSIKYSTLLESEKNTFMEIWKKRWDKFIADVATK

SEQ ID NO: 640 - protein, 441 aa, synthetic construct
  REGION 1..441: note = human ADA2R219Q/S262N/K371D/V99-Q144del->(GGGGS)1, maturenumbering
IDETRAHLLLKEKMMRLGGRLVLNTKEELANERLMTLKIAEMKEAMRTLIFPPSMHFFQAKHLIERSQVFNILRMMPKGAALHLHDIGIVTMDWLVRNGGGGSNVTEFDDSLLRNFTLVTQHPEVIYTNQNVVWSKFETIFFTISGLIHYAPVFRDYVFRSMQEFYEDNVLYMEIRAQLLPVYELSGEHHDEEWSVKTYQEVAQKFVETHPEFIGIKIIYNDHRSKDVAVIAESIRMAMGLRIKFPTVVAGFDLVGHEDTGHSLHDYKEALMIPAKDGVKLPYFFHAGETDWQGTSIDRNILDALMLNTTRIGHGFALSKHPAVRTYSWDKDIPIEVCPISNQVLKLVSDLRNHPVATLMATGHPMVISSDDPAMFGAKGLSYDFYEVFMGIGGMKADLRTLKQLAMNSIKYSTLLESEKNTFMEIWKKRWDKFIADVATK

SEQ ID NO: 641 - protein, 446 aa, synthetic construct
  REGION 1..446: note = human ADA2R219Q/S262N/K371D/V99-Q144del->(GGGGS)2, maturenumbering
IDETRAHLLLKEKMMRLGGRLVLNTKEELANERLMTLKIAEMKEAMRTLIFPPSMHFFQAKHLIERSQVFNILRMMPKGAALHLHDIGIVTMDWLVRNGGGGSGGGGSNVTEFDDSLLRNFTLVTQHPEVIYTNQNVVWSKFETIFFTISGLIHYAPVFRDYVFRSMQEFYEDNVLYMEIRAQLLPVYELSGEHHDEEWSVKTYQEVAQKFVETHPEFIGIKIIYNDHRSKDVAVIAESIRMAMGLRIKFPTVVAGFDLVGHEDTGHSLHDYKEALMIPAKDGVKLPYFFHAGETDWQGTSIDRNILDALMLNTTRIGHGFALSKHPAVRTYSWDKDIPIEVCPISNQVLKLVSDLRNHPVATLMATGHPMVISSDDPAMFGAKGLSYDFYEVFMGIGGMKADLRTLKQLAMNSIKYSTLLESEKNTFMEIWKKRWDKFIADVATK

SEQ ID NO: 642 - protein, 451 aa, synthetic construct
  REGION 1..451: note = human ADA2R219Q/S262N/K371D/V99-Q144del->(GGGGS)3, maturenumbering
IDETRAHLLLKEKMMRLGGRLVLNTKEELANERLMTLKIAEMKEAMRTLIFPPSMHFFQAKHLIERSQVFNILRMMPKGAALHLHDIGIVTMDWLVRNGGGGSGGGGSGGGGSNVTEFDDSLLRNFTLVTQHPEVIYTNQNVVWSKFETIFFTISGLIHYAPVFRDYVFRSMQEFYEDNVLYMEIRAQLLPVYELSGEHHDEEWSVKTYQEVAQKFVETHPEFIGIKIIYNDHRSKDVAVIAESIRMAMGLRIKFPTVVAGFDLVGHEDTGHSLHDYKEALMIPAKDGVKLPYFFHAGETDWQGTSIDRNILDALMLNTTRIGHGFALSKHPAVRTYSWDKDIPIEVCPISNQVLKLVSDLRNHPVATLMATGHPMVISSDDPAMFGAKGLSYDFYEVFMGIGGMKADLRTLKQLAMNSIKYSTLLESEKNTFMEIWKKRWDKFIADVATK

SEQ ID NO: 643 - protein, 444 aa, synthetic construct
  REGION 1..444: note = human ADA2R219Q/S262N/K371D/C105-T147del->(GGGGS)1, maturenumbering
IDETRAHLLLKEKMMRLGGRLVLNTKEELANERLMTLKIAEMKEAMRTLIFPPSMHFFQAKHLIERSQVFNILRMMPKGAALHLHDIGIVTMDWLVRNVTYRPHGGGGSEFDDSLLRNFTLVTQHPEVIYTNQNVVWSKFETIFFTISGLIHYAPVFRDYVFRSMQEFYEDNVLYMEIRAQLLPVYELSGEHHDEEWSVKTYQEVAQKFVETHPEFIGIKIIYNDHRSKDVAVIAESIRMAMGLRIKFPTVVAGFDLVGHEDTGHSLHDYKEALMIPAKDGVKLPYFFHAGETDWQGTSIDRNILDALMLNTTRIGHGFALSKHPAVRTYSWDKDIPIEVCPISNQVLKLVSDLRNHPVATLMATGHPMVISSDDPAMFGAKGLSYDFYEVFMGIGGMKADLRTLKQLAMNSIKYSTLLESEKNTFMEIWKKRWDKFIADVATK

SEQ ID NO: 644 - protein, 449 aa, synthetic construct
  REGION 1..449: note = human ADA2R219Q/S262N/K371D/C105-T147del->(GGGGS)2, maturenumbering
IDETRAHLLLKEKMMRLGGRLVLNTKEELANERLMTLKIAEMKEAMRTLIFPPSMHFFQAKHLIERSQVFNILRMMPKGAALHLHDIGIVTMDWLVRNVTYRPHGGGGSGGGGSEFDDSLLRNFTLVTQHPEVIYTNQNVVWSKFETIFFTISGLIHYAPVFRDYVFRSMQEFYEDNVLYMEIRAQLLPVYELSGEHHDEEWSVKTYQEVAQKFVETHPEFIGIKIIYNDHRSKDVAVIAESIRMAMGLRIKFPTVVAGFDLVGHEDTGHSLHDYKEALMIPAKDGVKLPYFFHAGETDWQGTSIDRNILDALMLNTTRIGHGFALSKHPAVRTYSWDKDIPIEVCPISNQVLKLVSDLRNHPVATLMATGHPMVISSDDPAMFGAKGLSYDFYEVFMGIGGMKADLRTLKQLAMNSIKYSTLLESEKNTFMEIWKKRWDKFIADVATK

SEQ ID NO: 645 - protein, 454 aa, synthetic construct
  REGION 1..454: note = human ADA2R219Q/S262N/K371D/C105-T147del->(GGGGS)3, maturenumbering
IDETRAHLLLKEKMMRLGGRLVLNTKEELANERLMTLKIAEMKEAMRTLIFPPSMHFFQAKHLIERSQVFNILRMMPKGAALHLHDIGIVTMDWLVRNVTYRPHGGGGSGGGGSGGGGSEFDDSLLRNFTLVTQHPEVIYTNQNVVWSKFETIFFTISGLIHYAPVFRDYVFRSMQEFYEDNVLYMEIRAQLLPVYELSGEHHDEEWSVKTYQEVAQKFVETHPEFIGIKIIYNDHRSKDVAVIAESIRMAMGLRIKFPTVVAGFDLVGHEDTGHSLHDYKEALMIPAKDGVKLPYFFHAGETDWQGTSIDRNILDALMLNTTRIGHGFALSKHPAVRTYSWDKDIPIEVCPISNQVLKLVSDLRNHPVATLMATGHPMVISSDDPAMFGAKGLSYDFYEVFMGIGGMKADLRTLKQLAMNSIKYSTLLESEKNTFMEIWKKRWDKFIADVATK

SEQ ID NO: 646 - protein, 440 aa, synthetic construct
  REGION 1..440: note = human ADA2 K371D/C105-T147del->(Gly)n, maturenumbering,where n = 2 to 20
  REPEAT 105: note = occurring 2, 3, 4, 5, 6, 7, 8, 9, 10, 11, 12, 13,14, 15, 16, 17, 18, 19 or 20 times
IDETRAHLLLKEKMMRLGGRLVLNTKEELANERLMTLKIAEMKEAMRTLIFPPSMHFFQAKHLIERSQVFNILRMMPKGAALHLHDIGIVTMDWLVRNVTYRPHGEFDDSLLRNFTLVTQHPEVIYTNQNVVWSKFETIFFTISGLIHYAPVFRDYVFRSMQEFYEDNVLYMEIRARLLPVYELSGEHHDEEWSVKTYQEVAQKFVETHPEFIGIKIIYSDHRSKDVAVIAESIRMAMGLRIKFPTVVAGFDLVGHEDTGHSLHDYKEALMIPAKDGVKLPYFFHAGETDWQGTSIDRNILDALMLNTTRIGHGFALSKHPAVRTYSWDKDIPIEVCPISNQVLKLVSDLRNHPVATLMATGHPMVISSDDPAMFGAKGLSYDFYEVFMGIGGMKADLRTLKQLAMNSIKYSTLLESEKNTFMEIWKKRWDKFIADVATK

SEQ ID NO: 647 - protein, 454 aa, synthetic construct
  REGION 1..454: note = human ADA2 K371D/C105-T147del->(Gly)15, maturenumbering
IDETRAHLLLKEKMMRLGGRLVLNTKEELANERLMTLKIAEMKEAMRTLIFPPSMHFFQAKHLIERSQVFNILRMMPKGAALHLHDIGIVTMDWLVRNVTYRPHGGGGGGGGGGGGGGGEFDDSLLRNFTLVTQHPEVIYTNQNVVWSKFETIFFTISGLIHYAPVFRDYVFRSMQEFYEDNVLYMEIRARLLPVYELSGEHHDEEWSVKTYQEVAQKFVETHPEFIGIKIIYSDHRSKDVAVIAESIRMAMGLRIKFPTVVAGFDLVGHEDTGHSLHDYKEALMIPAKDGVKLPYFFHAGETDWQGTSIDRNILDALMLNTTRIGHGFALSKHPAVRTYSWDKDIPIEVCPISNQVLKLVSDLRNHPVATLMATGHPMVISSDDPAMFGAKGLSYDFYEVFMGIGGMKADLRTLKQLAMNSIKYSTLLESEKNTFMEIWKKRWDKFIADVATK

SEQ ID NO: 648 - protein, 449 aa, synthetic construct
  REGION 1..449: note = human ADA2 K371D/C105-T147del->(Gly)10, maturenumbering
IDETRAHLLLKEKMMRLGGRLVLNTKEELANERLMTLKIAEMKEAMRTLIFPPSMHFFQAKHLIERSQVFNILRMMPKGAALHLHDIGIVTMDWLVRNVTYRPHGGGGGGGGGGEFDDSLLRNFTLVTQHPEVIYTNQNVVWSKFETIFFTISGLIHYAPVFRDYVFRSMQEFYEDNVLYMEIRARLLPVYELSGEHHDEEWSVKTYQEVAQKFVETHPEFIGIKIIYSDHRSKDVAVIAESIRMAMGLRIKFPTVVAGFDLVGHEDTGHSLHDYKEALMIPAKDGVKLPYFFHAGETDWQGTSIDRNILDALMLNTTRIGHGFALSKHPAVRTYSWDKDIPIEVCPISNQVLKLVSDLRNHPVATLMATGHPMVISSDDPAMFGAKGLSYDFYEVFMGIGGMKADLRTLKQLAMNSIKYSTLLESEKNTFMEIWKKRWDKFIADVATK

SEQ ID NO: 649 - protein, 446 aa, synthetic construct
  REGION 1..446: note = human ADA2 K371D/C105-T147del->(Gly)7, maturenumbering
IDETRAHLLLKEKMMRLGGRLVLNTKEELANERLMTLKIAEMKEAMRTLIFPPSMHFFQAKHLIERSQVFNILRMMPKGAALHLHDIGIVTMDWLVRNVTYRPHGGGGGGGEFDDSLLRNFTLVTQHPEVIYTNQNVVWSKFETIFFTISGLIHYAPVFRDYVFRSMQEFYEDNVLYMEIRARLLPVYELSGEHHDEEWSVKTYQEVAQKFVETHPEFIGIKIIYSDHRSKDVAVIAESIRMAMGLRIKFPTVVAGFDLVGHEDTGHSLHDYKEALMIPAKDGVKLPYFFHAGETDWQGTSIDRNILDALMLNTTRIGHGFALSKHPAVRTYSWDKDIPIEVCPISNQVLKLVSDLRNHPVATLMATGHPMVISSDDPAMFGAKGLSYDFYEVFMGIGGMKADLRTLKQLAMNSIKYSTLLESEKNTFMEIWKKRWDKFIADVATK

SEQ ID NO: 650 - protein, 444 aa, synthetic construct
  REGION 1..444: note = human ADA2 K371D/C105-T147del->(Gly)5, maturenumbering
IDETRAHLLLKEKMMRLGGRLVLNTKEELANERLMTLKIAEMKEAMRTLIFPPSMHFFQAKHLIERSQVFNILRMMPKGAALHLHDIGIVTMDWLVRNVTYRPHGGGGGEFDDSLLRNFTLVTQHPEVIYTNQNVVWSKFETIFFTISGLIHYAPVFRDYVFRSMQEFYEDNVLYMEIRARLLPVYELSGEHHDEEWSVKTYQEVAQKFVETHPEFIGIKIIYSDHRSKDVAVIAESIRMAMGLRIKFPTVVAGFDLVGHEDTGHSLHDYKEALMIPAKDGVKLPYFFHAGETDWQGTSIDRNILDALMLNTTRIGHGFALSKHPAVRTYSWDKDIPIEVCPISNQVLKLVSDLRNHPVATLMATGHPMVISSDDPAMFGAKGLSYDFYEVFMGIGGMKADLRTLKQLAMNSIKYSTLLESEKNTFMEIWKKRWDKFIADVATK

SEQ ID NO: 651 - protein, 442 aa, synthetic construct
  REGION 1..442: note = human ADA2 K371D/C105-T147del->(Gly)3, maturenumbering
IDETRAHLLLKEKMMRLGGRLVLNTKEELANERLMTLKIAEMKEAMRTLIFPPSMHFFQAKHLIERSQVFNILRMMPKGAALHLHDIGIVTMDWLVRNVTYRPHGGGEFDDSLLRNFTLVTQHPEVIYTNQNVVWSKFETIFFTISGLIHYAPVFRDYVFRSMQEFYEDNVLYMEIRARLLPVYELSGEHHDEEWSVKTYQEVAQKFVETHPEFIGIKIIYSDHRSKDVAVIAESIRMAMGLRIKFPTVVAGFDLVGHEDTGHSLHDYKEALMIPAKDGVKLPYFFHAGETDWQGTSIDRNILDALMLNTTRIGHGFALSKHPAVRTYSWDKDIPIEVCPISNQVLKLVSDLRNHPVATLMATGHPMVISSDDPAMFGAKGLSYDFYEVFMGIGGMKADLRTLKQLAMNSIKYSTLLESEKNTFMEIWKKRWDKFIADVATK

SEQ ID NO: 652 - protein, 441 aa, synthetic construct; identical to SEQ ID NO: 589
  REGION 1..441: note = human ADA2 K371D/V99-Q144del->(GGGGS)n, maturenumbering,where n = 1 to 5
  REPEAT 99..103: note = occurring 1, 2, 3, 4 or 5 times

SEQ ID NO: 653 - protein, 444 aa, synthetic construct; identical to SEQ ID NO: 592
  REGION 1..444: note = human ADA2 K371D/C105-T147del->(GGGGS)n, maturenumbering, where n = 1 to 5
  REPEAT 105..109: note = occurring 1, 2, 3, 4 or 5 times

SEQ ID NO: 654 - protein, 423 aa, synthetic construct
  REGION 1..423: note = human ADA2 K371D/N98-N156Del, mature numbering
IDETRAHLLLKEKMMRLGGRLVLNTKEELANERLMTLKIAEMKEAMRTLIFPPSMHFFQAKHLIERSQVFNILRMMPKGAALHLHDIGIVTMDWLVRFTLVTQHPEVIYTNQNVVWSKFETIFFTISGLIHYAPVFRDYVFRSMQEFYEDNVLYMEIRARLLPVYELSGEHHDEEWSVKTYQEVAQKFVETHPEFIGIKIIYSDHRSKDVAVIAESIRMAMGLRIKFPTVVAGFDLVGHEDTGHSLHDYKEALMIPAKDGVKLPYFFHAGETDWQGTSIDRNILDALMLNTTRIGHGFALSKHPAVRTYSWDKDIPIEVCPISNQVLKLVSDLRNHPVATLMATGHPMVISSDDPAMFGAKGLSYDFYEVFMGIGGMKADLRTLKQLAMNSIKYSTLLESEKNTFMEIWKKRWDKFIADVATK

SEQ ID NO: 655 - protein, 438 aa, synthetic construct
  REGION 1..438: note = human ADA2 K371D/C105-E148Del, mature numbering
IDETRAHLLLKEKMMRLGGRLVLNTKEELANERLMTLKIAEMKEAMRTLIFPPSMHFFQAKHLIERSQVFNILRMMPKGAALHLHDIGIVTMDWLVRNVTYRPHFDDSLLRNFTLVTQHPEVIYTNQNVVWSKFETIFFTISGLIHYAPVFRDYVFRSMQEFYEDNVLYMEIRARLLPVYELSGEHHDEEWSVKTYQEVAQKFVETHPEFIGIKIIYSDHRSKDVAVIAESIRMAMGLRIKFPTVVAGFDLVGHEDTGHSLHDYKEALMIPAKDGVKLPYFFHAGETDWQGTSIDRNILDALMLNTTRIGHGFALSKHPAVRTYSWDKDIPIEVCPISNQVLKLVSDLRNHPVATLMATGHPMVISSDDPAMFGAKGLSYDFYEVFMGIGGMKADLRTLKQLAMNSIKYSTLLESEKNTFMEIWKKRWDKFIADVATK

SEQ ID NO: 656 - protein, 439 aa, synthetic construct
  REGION 1..439: note = human ADA2 K371D/C105-T147Del, mature numbering
IDETRAHLLLKEKMMRLGGRLVLNTKEELANERLMTLKIAEMKEAMRTLIFPPSMHFFQAKHLIERSQVFNILRMMPKGAALHLHDIGIVTMDWLVRNVTYRPHEFDDSLLRNFTLVTQHPEVIYTNQNVVWSKFETIFFTISGLIHYAPVFRDYVFRSMQEFYEDNVLYMEIRARLLPVYELSGEHHDEEWSVKTYQEVAQKFVETHPEFIGIKIIYSDHRSKDVAVIAESIRMAMGLRIKFPTVVAGFDLVGHEDTGHSLHDYKEALMIPAKDGVKLPYFFHAGETDWQGTSIDRNILDALMLNTTRIGHGFALSKHPAVRTYSWDKDIPIEVCPISNQVLKLVSDLRNHPVATLMATGHPMVISSDDPAMFGAKGLSYDFYEVFMGIGGMKADLRTLKQLAMNSIKYSTLLESEKNTFMEIWKKRWDKFIADVATK

SEQ ID NO: 657 - protein, 436 aa, synthetic construct
  REGION 1..436: note = human ADA2 K371D/V99-Q144del, mature numbering
IDETRAHLLLKEKMMRLGGRLVLNTKEELANERLMTLKIAEMKEAMRTLIFPPSMHFFQAKHLIERSQVFNILRMMPKGAALHLHDIGIVTMDWLVRNNVTEFDDSLLRNFTLVTQHPEVIYTNQNVVWSKFETIFFTISGLIHYAPVFRDYVFRSMQEFYEDNVLYMEIRARLLPVYELSGEHHDEEWSVKTYQEVAQKFVETHPEFIGIKIIYSDHRSKDVAVIAESIRMAMGLRIKFPTVVAGFDLVGHEDTGHSLHDYKEALMIPAKDGVKLPYFFHAGETDWQGTSIDRNILDALMLNTTRIGHGFALSKHPAVRTYSWDKDIPIEVCPISNQVLKLVSDLRNHPVATLMATGHPMVISSDDPAMFGAKGLSYDFYEVFMGIGGMKADLRTLKQLAMNSIKYSTLLESEKNTFMEIWKKRWDKFIADVATK

SEQ ID NO: 658 - protein, 440 aa, synthetic construct
  REGION 1..440: note = human ADA2 R219Q/S262N/C105-T147del->(Gly)n,mature numbering, where n = 2 to 20
  REPEAT 105: note = occurring 2, 3, 4, 5, 6, 7, 8, 9, 10, 11, 12, 13,14, 15, 16, 17, 18, 19 or 20 times
IDETRAHLLLKEKMMRLGGRLVLNTKEELANERLMTLKIAEMKEAMRTLIFPPSMHFFQAKHLIERSQVFNILRMMPKGAALHLHDIGIVTMDWLVRNVTYRPHGEFDDSLLRNFTLVTQHPEVIYTNQNVVWSKFETIFFTISGLIHYAPVFRDYVFRSMQEFYEDNVLYMEIRAQLLPVYELSGEHHDEEWSVKTYQEVAQKFVETHPEFIGIKIIYNDHRSKDVAVIAESIRMAMGLRIKFPTVVAGFDLVGHEDTGHSLHDYKEALMIPAKDGVKLPYFFHAGETDWQGTSIDRNILDALMLNTTRIGHGFALSKHPAVRTYSWKKDIPIEVCPISNQVLKLVSDLRNHPVATLMATGHPMVISSDDPAMFGAKGLSYDFYEVFMGIGGMKADLRTLKQLAMNSIKYSTLLESEKNTFMEITKKRWDKFIADVATK

SEQ ID NO: 659 - protein, 482 aa, synthetic construct
  REGION 1..482: note = human ADA2 R219Q/S262N/K11A, mature numbering
IDETRAHLLLAEKMMRLGGRLVLNTKEELANERLMTLKIAEMKEAMRTLIFPPSMHFFQAKHLIERSQVFNILRMMPKGAALHLHDIGIVTMDWLVRNVTYRPHCHICFTPRGIMQFRFAHPTPRPSEKCSKWILLEDYRKRVQNVTEFDDSLLRNFTLVTQHPEVIYTNQNVVWSKFETIFFTISGLIHYAPVFRDYVFRSMQEFYEDNVLYMEIRAQLLPVYELSGEHHDEEWSVKTYQEVAQKFVETHPEFIGIKIIYNDHRSKDVAVIAESIRMAMGLRIKFPTVVAGFDLVGHEDTGHSLHDYKEALMIPAKDGVKLPYFFHAGETDWQGTSIDRNILDALMLNTTRIGHGFALSKHPAVRTYSWKKDIPIEVCPISNQVLKLVSDLRNHPVATLMATGHPMVISSDDPAMFGAKGLSYDFYEVFMGIGGMKADLRTLKQLAMNSIKYSTLLESEKNTFMEIWKKRWDKFIADVATK

SEQ ID NO: 660 - protein, 482 aa, synthetic construct
  REGION 1..482: note = human ADA2 R219Q/S262N/K11D, mature numbering
IDETRAHLLLDEKMMRLGGRLVLNTKEELANERLMTLKIAEMKEAMRTLIFPPSMHFFQAKHLIERSQVFNILRMMPKGAALHLHDIGIVTMDWLVRNVTYRPHCHICFTPRGIMQFRFAHPTPRPSEKCSKWILLEDYRKRVQNVTEFDDSLLRNFTLVTQHPEVIYTNQNVVWSKFETIFFTISGLIHYAPVFRDYVFRSMQEFYEDNVLYMEIRAQLLPVYELSGEHHDEEWSVKTYQEVAQKFVETHPEFIGIKIIYNDHRSKDVAVIAESIRMAMGLRIKFPTVVAGFDLVGHEDTGHSLHDYKEALMIPAKDGVKLPYFFHAGETDWQGTSIDRNILDALMLNTTRIGHGFALSKHPAVRTYSWKKDIPIEVCPISNQVLKLVSDLRNHPVATLMATGHPMVISSDDPAMFGAKGLSYDFYEVFMGIGGMKADLRTLKQLAMNSIKYSTLLESEKNTFMEIWKKRWDKFIADVATK

SEQ ID NO: 661 - protein, 482 aa, synthetic construct
  REGION 1..482: note = human ADA2 R219Q/S262N/K11E, mature numbering
IDETRAHLLLEEKMMRLGGRLVLNTKEELANERLMTLKIAEMKEAMRTLIFPPSMHFFQAKHLIERSQVFNILRMMPKGAALHLHDIGIVTMDWLVRNVTYRPHCHICFTPRGIMQFRFAHPTPRPSEKCSKWILLEDYRKRVQNVTEFDDSLLRNFTLVTQHPEVIYTNQNVVWSKFETIFFTISGLIHYAPVFRDYVFRSMQEFYEDNVLYMEIRAQLLPVYELSGEHHDEEWSVKTYQEVAQKFVETHPEFIGIKIIYNDHRSKDVAVIAESIRMAMGLRIKFPTVVAGFDLVGHEDTGHSLHDYKEALMIPAKDGVKLPYFFHAGETDWQGTSIDRNILDALMLNTTRIGHGFALSKHPAVRTYSWKKDIPIEVCPISNQVLKLVSDLRNHPVATLMATGHPMVISSDDPAMFGAKGLSYDFYEVFMGIGGMKADLRTLKQLAMNSIKYSTLLESEKNTFMEIWKKRWDKFIADVATK

SEQ ID NO: 662 - protein, 482 aa, synthetic construct
  REGION 1..482: note = human ADA2 R219Q/S262N/K13A, mature numbering
IDETRAHLLLKEAMMRLGGRLVLNTKEELANERLMTLKIAEMKEAMRTLIFPPSMHFFQAKHLIERSQVFNILRMMPKGAALHLHDIGIVTMDWLVRNVTYRPHCHICFTPRGIMQFRFAHPTPRPSEKCSKWILLEDYRKRVQNVTEFDDSLLRNFTLVTQHPEVIYTNQNVVWSKFETIFFTISGLIHYAPVFRDYVFRSMQEFYEDNVLYMEIRAQLLPVYELSGEHHDEEWSVKTYQEVAQKFVETHPEFIGIKIIYNDHRSKDVAVIAESIRMAMGLRIKFPTVVAGFDLVGHEDTGHSLHDYKEALMIPAKDGVKLPYFFHAGETDWQGTSIDRNILDALMLNTTRIGHGFALSKHPAVRTYSWKKDIPIEVCPISNQVLKLVSDLRNHPVATLMATGHPMVISSDDPAMFGAKGLSYDFYEVFMGIGGMKADLRTLKQLAMNSIKYSTLLESEKNTFMEIWKKRWDKFIADVATK

SEQ ID NO: 663 - protein, 482 aa, synthetic construct
  REGION 1..482: note = human ADA2 R219Q/S262N/K13D, mature numbering
IDETRAHLLLKEDMMRLGGRLVLNTKEELANERLMTLKIAEMKEAMRTLIFPPSMHFFQAKHLIERSQVFNILRMMPKGAALHLHDIGIVTMDWLVRNVTYRPHCHICFTPRGIMQFRFAHPTPRPSEKCSKWILLEDYRKRVQNVTEFDDSLLRNFTLVTQHPEVIYTNQNVVWSKFETIFFTISGLIHYAPVFRDYVFRSMQEFYEDNVLYMEIRAQLLPVYELSGEHHDEEWSVKTYQEVAQKFVETHPEFIGIKIIYNDHRSKDVAVIAESIRMAMGLRIKFPTVVAGFDLVGHEDTGHSLHDYKEALMIPAKDGVKLPYFFHAGETDWQGTSIDRNILDALMLNTTRIGHGFALSKHPAVRTYSWKKDIPIEVCPISNQVLKLVSDLRNHPVATLMATGHPMVISSDDPAMFGAKGLSYDFYEVFMGIGGMKADLRTLKQLAMNSIKYSTLLESEKNTFMEIWKKRWDKFIADVATK

SEQ ID NO: 664 - protein, 441 aa, synthetic construct; identical to SEQ ID NO: 634
  REGION 1..441: note = human ADA2 R219Q/S262N/V99-Q144del->(GGGGS)n,mature numbering,where n = 1 to 5
  REPEAT 99..103: note = occurring 1, 2, 3, 4 or 5 times

SEQ ID NO: 665 - protein, 444 aa, synthetic construct; identical to SEQ ID NO: 637
  REGION 1..444: note = human ADA2 R219Q/S262N/C105-T147del->(GGGGS)n,maturenumbering, where; n = 1 to 5
  REPEAT 105..109: note = occurring 1, 2, 3, 4 or 5 times

SEQ ID NO: 666 - protein, 423 aa, synthetic construct
  REGION 1..423: note = human ADA2 R219Q/S262N/N98-N156Del, maturenumbering
IDETRAHLLLKEKMMRLGGRLVLNTKEELANERLMTLKIAEMKEAMRTLIFPPSMHFFQAKHLIERSQVFNILRMMPKGAALHLHDIGIVTMDWLVRFTLVTQHPEVIYTNQNVVWSKFETIFFTISGLIHYAPVFRDYVFRSMQEFYEDNVLYMEIRAQLLPVYELSGEHHDEEWSVKTYQEVAQKFVETHPEFIGIKIIYNDHRSKDVAVIAESIRMAMGLRIKFPTVVAGFDLVGHEDTGHSLHDYKEALMIPAKDGVKLPYFFHAGETDWQGTSIDRNILDALMLNTTRIGHGFALSKHPAVRTYSWKKDIPIEVCPISNQVLKLVSDLRNHPVATLMATGHPMVISSDDPAMFGAKGLSYDFYEVFMGIGGMKADLRTLKQLAMNSIKYSTLLESEKNTFMEIWKKRWDKFIADVATK

SEQ ID NO: 667 - protein, 438 aa, synthetic construct
  REGION 1..438: note = human ADA2 R219Q/S262N/C105-E148Del, maturenumbering
IDETRAHLLLKEKMMRLGGRLVLNTKEELANERLMTLKIAEMKEAMRTLIFPPSMHFFQAKHLIERSQVFNILRMMPKGAALHLHDIGIVTMDWLVRNVTYRPHFDDSLLRNFTLVTQHPEVIYTNQNVVWSKFETIFFTISGLIHYAPVFRDYVFRSMQEFYEDNVLYMEIRAQLLPVYELSGEHHDEEWSVKTYQEVAQKFVETHPEFIGIKIIYNDHRSKDVAVIAESIRMAMGLRIKFPTVVAGFDLVGHEDTGHSLHDYKEALMIPAKDGVKLPYFFHAGETDWQGTSIDRNILDALMLNTTRIGHGFALSKHPAVRTYSWKKDIPIEVCPISNQVLKLVSDLRNHPVATLMATGHPMVISSDDPAMFGAKGLSYDFYEVFMGIGGMKADLRTLKQLAMNSIKYSTLLESEKNTFMEIWKKRWDKFIADVATK

SEQ ID NO: 668 - protein, 439 aa, synthetic construct
  REGION 1..439: note = human ADA2 R219Q/S262N/C105-T147Del, maturenumbering
IDETRAHLLLKEKMMRLGGRLVLNTKEELANERLMTLKIAEMKEAMRTLIFPPSMHFFQAKHLIERSQVFNILRMMPKGAALHLHDIGIVTMDWLVRNVTYRPHEFDDSLLRNFTLVTQHPEVIYTNQNVVWSKFETIFFTISGLIHYAPVFRDYVFRSMQEFYEDNVLYMEIRAQLLPVYELSGEHHDEEWSVKTYQEVAQKFVETHPEFIGIKIIYNDHRSKDVAVIAESIRMAMGLRIKFPTVVAGFDLVGHEDTGHSLHDYKEALMIPAKDGVKLPYFFHAGETDWQGTSIDRNILDALMLNTTRIGHGFALSKHPAVRTYSWKKDIPIEVCPISNQVLKLVSDLRNHPVATLMATGHPMVISSDDPAMFGAKGLSYDFYEVFMGIGGMKADLRTLKQLAMNSIKYSTLLESEKNTFMEIWKKRWDKFIADVATK

SEQ ID NO: 669 - protein, 436 aa, synthetic construct
  REGION 1..436: note = human ADA2 R219Q/S262N/V99-Q144del, maturenumbering
IDETRAHLLLKEKMMRLGGRLVLNTKEELANERLMTLKIAEMKEAMRTLIFPPSMHFFQAKHLIERSQVFNILRMMPKGAALHLHDIGIVTMDWLVRNNVTEFDDSLLRNFTLVTQHPEVIYTNQNVVWSKFETIFFTISGLIHYAPVFRDYVFRSMQEFYEDNVLYMEIRAQLLPVYELSGEHHDEEWSVKTYQEVAQKFVETHPEFIGIKIIYNDHRSKDVAVIAESIRMAMGLRIKFPTVVAGFDLVGHEDTGHSLHDYKEALMIPAKDGVKLPYFFHAGETDWQGTSIDRNILDALMLNTTRIGHGFALSKHPAVRTYSWKKDIPIEVCPISNQVLKLVSDLRNHPVATLMATGHPMVISSDDPAMFGAKGLSYDFYEVFMGIGGMKADLRTLKQLAMNSIKYSTLLESEKNTFMEIWKKRWDKFIADVATK

SEQ ID NO: 670 - protein, 440 aa, synthetic construct
  REGION 1..440: note = human ADA2 R219Q/S262N/K371D/C105-T147del->(Gly)n,mature numbering,where n = 2 to 20
  REPEAT 105: note = occurring 2, 3, 4, 5, 6, 7, 8, 9, 10, 11, 12, 13,14, 15, 16, 17, 18, 19 or 20 times
IDETRAHLLLKEKMMRLGGRLVLNTKEELANERLMTLKIAEMKEAMRTLIFPPSMHFFQAKHLIERSQVFNILRMMPKGAALHLHDIGIVTMDWLVRNVTYRPHGEFDDSLLRNFTLVTQHPEVIYTNQNVVWSKFETIFFTISGLIHYAPVFRDYVFRSMQEFYEDNVLYMEIRAQLLPVYELSGEHHDEEWSVKTYQEVAQKFVETHPEFIGIKIIYNDHRSKDVAVIAESIRMAMGLRIKFPTVVAGFDLVGHEDTGHSLHDYKEALMIPAKDGVKLPYFFHAGETDWQGTSIDRNILDALMLNTTRIGHGFALSKHPAVRTYSWDKDIPIEVCPISNQVLKLVSDLRNHPVATLMATGHPMVISSDDPAMFGAKGLSYDFYEVFMGIGGMKADLRTLKQLAMNSIKYSTLLESEKNTFMEIWKKRWDKFIADVATK

SEQ ID NO: 671 - protein, 448 aa, synthetic construct
  REGION 1..448: note = human ADA2R219Q/S262N/K371D/C105-T147del->(Gly)15, maturenumbering
IDETRAHLLLKEKMMRLGGRLVLNTKEELANERLMTLKIAEMKEAMRTLIFPPSMHFFQAKHLIERSQVFNILRMMPKGAALHLHDIGIVTMDWLVRNVTYRPHGGGGGGGGGGGGGGGEFDDSLLRNFTLVTQHPEVIYTNQNVVWSKFETIFFTISGLIHYAPVFRDYVFRSMQEFYEDNVLYMEIRAQLLPVYELSGEHHDEEWSVKTYQEVAQKFVETHPEFIGIKIIYNDHRSKDVAVIAESIRMAMGLRIKFPTVVAGFDLVGHEDTGHSLHDYKEALMIPAKDGVKLPYFFHAGETDWQGTSIDRNILDALMLNTTRIGHGFALSKHPAVRTYSWDKDIPIEVCPISNQVLKLVSDLRNHPVATLMATGHPMVISSDDPAMFGAKGLSYDFYEVFMGIGGMKADLRTLKQLAMNSIKYSTLLESEKNTFMEIWKKRWDKFI

SEQ ID NO: 672 - protein, 449 aa, synthetic construct
  REGION 1..449: note = human ADA2R219Q/S262N/K371D/C105-T147del->(Gly)10, maturenumbering
IDETRAHLLLKEKMMRLGGRLVLNTKEELANERLMTLKIAEMKEAMRTLIFPPSMHFFQAKHLIERSQVFNILRMMPKGAALHLHDIGIVTMDWLVRNVTYRPHGGGGGGGGGGEFDDSLLRNFTLVTQHPEVIYTNQNVVWSKFETIFFTISGLIHYAPVFRDYVFRSMQEFYEDNVLYMEIRAQLLPVYELSGEHHDEEWSVKTYQEVAQKFVETHPEFIGIKIIYNDHRSKDVAVIAESIRMAMGLRIKFPTVVAGFDLVGHEDTGHSLHDYKEALMIPAKDGVKLPYFFHAGETDWQGTSIDRNILDALMLNTTRIGHGFALSKHPAVRTYSWDKDIPIEVCPISNQVLKLVSDLRNHPVATLMATGHPMVISSDDPAMFGAKGLSYDFYEVFMGIGGMKADLRTLKQLAMNSIKYSTLLESEKNTFMEIWKKRWDKFIADVATK

SEQ ID NO: 673 - protein, 446 aa, synthetic construct
  REGION 1..446: note = human ADA2 R219Q/S262N/K371D/C105-T147del->(Gly)7,mature numbering
IDETRAHLLLKEKMMRLGGRLVLNTKEELANERLMTLKIAEMKEAMRTLIFPPSMHFFQAKHLIERSQVFNILRMMPKGAALHLHDIGIVTMDWLVRNVTYRPHGGGGGGGEFDDSLLRNFTLVTQHPEVIYTNQNVVWSKFETIFFTISGLIHYAPVFRDYVFRSMQEFYEDNVLYMEIRAQLLPVYELSGEHHDEEWSVKTYQEVAQKFVETHPEFIGIKIIYNDHRSKDVAVIAESIRMAMGLRIKFPTVVAGFDLVGHEDTGHSLHDYKEALMIPAKDGVKLPYFFHAGETDWQGTSIDRNILDALMLNTTRIGHGFALSKHPAVRTYSWDKDIPIEVCPISNQVLKLVSDLRNHPVATLMATGHPMVISSDDPAMFGAKGLSYDFYEVFMGIGGMKADLRTLKQLAMNSIKYSTLLESEKNTFMEIWKKRWDKFIADVATK

SEQ ID NO: 674 - protein, 444 aa, synthetic construct
  REGION 1..444: note = human ADA2 R219Q/S262N/K371D/C105-T147del->(Gly)5,mature numbering
IDETRAHLLLKEKMMRLGGRLVLNTKEELANERLMTLKIAEMKEAMRTLIFPPSMHFFQAKHLIERSQVFNILRMMPKGAALHLHDIGIVTMDWLVRNVTYRPHGGGGGEFDDSLLRNFTLVTQHPEVIYTNQNVVWSKFETIFFTISGLIHYAPVFRDYVFRSMQEFYEDNVLYMEIRAQLLPVYELSGEHHDEEWSVKTYQEVAQKFVETHPEFIGIKIIYNDHRSKDVAVIAESIRMAMGLRIKFPTVVAGFDLVGHEDTGHSLHDYKEALMIPAKDGVKLPYFFHAGETDWQGTSIDRNILDALMLNTTRIGHGFALSKHPAVRTYSWDKDIPIEVCPISNQVLKLVSDLRNHPVATLMATGHPMVISSDDPAMFGAKGLSYDFYEVFMGIGGMKADLRTLKQLAMNSIKYSTLLESEKNTFMEIWKKRWDKFIADVATK

SEQ ID NO: 675 - protein, 442 aa, synthetic construct
  REGION 1..442: note = human ADA2 R219Q/S262N/K371D/C105-T147del->(Gly)3,mature numbering
IDETRAHLLLKEKMMRLGGRLVLNTKEELANERLMTLKIAEMKEAMRTLIFPPSMHFFQAKHLIERSQVFNILRMMPKGAALHLHDIGIVTMDWLVRNVTYRPHGGGEFDDSLLRNFTLVTQHPEVIYTNQNVVWSKFETIFFTISGLIHYAPVFRDYVFRSMQEFYEDNVLYMEIRAQLLPVYELSGEHHDEEWSVKTYQEVAQKFVETHPEFIGIKIIYNDHRSKDVAVIAESIRMAMGLRIKFPTVVAGFDLVGHEDTGHSLHDYKEALMIPAKDGVKLPYFFHAGETDWQGTSIDRNILDALMLNTTRIGHGFALSKHPAVRTYSWDKDIPIEVCPISNQVLKLVSDLRNHPVATLMATGHPMVISSDDPAMFGAKGLSYDFYEVFMGIGGMKADLRTLKQLAMNSIKYSTLLESEKNTFMEIWKKRWDKFIADVATK

SEQ ID NO: 676 - protein, 441 aa, synthetic construct; identical to SEQ ID NO: 640
  REGION 1..441: note = human ADA2R219Q/S262N/K371D/V99-Q144del->(GGGGS)n, maturenumbering, where n = 1 to 5
  REPEAT 99..103: note = occurring 1, 2, 3, 4 or 5 times

SEQ ID NO: 677 - protein, 444 aa, synthetic construct; identical to SEQ ID NO: 643
  REGION 1..444: note = human ADA2R219Q/S262N/K371D/C105-T147del->(GGGGS)n, maturenumbering, where n = 1 to 5
  REPEAT 105..109: note = occurring 1, 2, 3, 4 or 5 times

SEQ ID NO: 678 - protein, 423 aa, synthetic construct
  REGION 1..423: note = human ADA2 R219Q/S262N/K371D/N98-N156Del, maturenumbering
IDETRAHLLLKEKMMRLGGRLVLNTKEELANERLMTLKIAEMKEAMRTLIFPPSMHFFQAKHLIERSQVFNILRMMPKGAALHLHDIGIVTMDWLVRFTLVTQHPEVIYTNQNVVWSKFETIFFTISGLIHYAPVFRDYVFRSMQEFYEDNVLYMEIRAQLLPVYELSGEHHDEEWSVKTYQEVAQKFVETHPEFIGIKIIYNDHRSKDVAVIAESIRMAMGLRIKFPTVVAGFDLVGHEDTGHSLHDYKEALMIPAKDGVKLPYFFHAGETDWQGTSIDRNILDALMLNTTRIGHGFALSKHPAVRTYSWDKDIPIEVCPISNQVLKLVSDLRNHPVATLMATGHPMVISSDDPAMFGAKGLSYDFYEVFMGIGGMKADLRTLKQLAMNSIKYSTLLESEKNTFMEIWKKRWDKFIADVATK

SEQ ID NO: 679 - protein, 438 aa, synthetic construct
  REGION 1..438: note = human ADA2 R219Q/S262N/K371D/C105-E148Del, maturenumbering
IDETRAHLLLKEKMMRLGGRLVLNTKEELANERLMTLKIAEMKEAMRTLIFPPSMHFFQAKHLIERSQVFNILRMMPKGAALHLHDIGIVTMDWLVRNVTYRPHFDDSLLRNFTLVTQHPEVIYTNQNVVWSKFETIFFTISGLIHYAPVFRDYVFRSMQEFYEDNVLYMEIRAQLLPVYELSGEHHDEEWSVKTYQEVAQKFVETHPEFIGIKIIYNDHRSKDVAVIAESIRMAMGLRIKFPTVVAGFDLVGHEDTGHSLHDYKEALMIPAKDGVKLPYFFHAGETDWQGTSIDRNILDALMLNTTRIGHGFALSKHPAVRTYSWDKDIPIEVCPISNQVLKLVSDLRNHPVATLMATGHPMVISSDDPAMFGAKGLSYDFYEVFMGIGGMKADLRTLKQLAMNSIKYSTLLESEKNTFMEIWKKRWDKFIADVATK

SEQ ID NO: 680 - protein, 439 aa, synthetic construct
  REGION 1..439: note = human ADA2 R219Q/S262N/K371D/C105-T147Del, maturenumbering
IDETRAHLLLKEKMMRLGGRLVLNTKEELANERLMTLKIAEMKEAMRTLIFPPSMHFFQAKHLIERSQVFNILRMMPKGAALHLHDIGIVTMDWLVRNVTYRPHEFDDSLLRNFTLVTQHPEVIYTNQNVVWSKFETIFFTISGLIHYAPVFRDYVFRSMQEFYEDNVLYMEIRAQLLPVYELSGEHHDEEWSVKTYQEVAQKFVETHPEFIGIKIIYNDHRSKDVAVIAESIRMAMGLRIKFPTVVAGFDLVGHEDTGHSLHDYKEALMIPAKDGVKLPYFFHAGETDWQGTSIDRNILDALMLNTTRIGHGFALSKHPAVRTYSWDKDIPIEVCPISNQVLKLVSDLRNHPVATLMATGHPMVISSDDPAMFGAKGLSYDFYEVFMGIGGMKADLRTLKQLAMNSIKYSTLLESEKNTFMEIWKKRWDKFIADVATK

SEQ ID NO: 681 - protein, 436 aa, synthetic construct
  REGION 1..436: note = human ADA2 R219Q/S262N/K371D/V99-Q144del, maturenumbering
IDETRAHLLLKEKMMRLGGRLVLNTKEELANERLMTLKIAEMKEAMRTLIFPPSMHFFQAKHLIERSQVFNILRMMPKGAALHLHDIGIVTMDWLVRNNVTEFDDSLLRNFTLVTQHPEVIYTNQNVVWSKFETIFFTISGLIHYAPVFRDYVFRSMQEFYEDNVLYMEIRAQLLPVYELSGEHHDEEWSVKTYQEVAQKFVETHPEFIGIKIIYNDHRSKDVAVIAESIRMAMGLRIKFPTVVAGFDLVGHEDTGHSLHDYKEALMIPAKDGVKLPYFFHAGETDWQGTSIDRNILDALMLNTTRIGHGFALSKHPAVRTYSWDKDIPIEVCPISNQVLKLVSDLRNHPVATLMATGHPMVISSDDPAMFGAKGLSYDFYEVFMGIGGMKADLRTLKQLAMNSIKYSTLLESEKNTFMEIWKKRWDKFIADVATK

SEQ ID NO: 682 - protein, 482 aa, synthetic construct
  REGION 1..482: note = human ADA2 R219Q/S262N/K13E, mature numbering
IDETRAHLLLKEEMMRLGGRLVLNTKEELANERLMTLKIAEMKEAMRTLIFPPSMHFFQAKHLIERSQVFNILRMMPKGAALHLHDIGIVTMDWLVRNVTYRPHCHICFTPRGIMQFRFAHPTPRPSEKCSKWILLEDYRKRVQNVTEFDDSLLRNFTLVTQHPEVIYTNQNVVWSKFETIFFTISGLIHYAPVFRDYVFRSMQEFYEDNVLYMEIRAQLLPVYELSGEHHDEEWSVKTYQEVAQKFVETHPEFIGIKIIYNDHRSKDVAVIAESIRMAMGLRIKFPTVVAGFDLVGHEDTGHSLHDYKEALMIPAKDGVKLPYFFHAGETDWQGTSIDRNILDALMLNTTRIGHGFALSKHPAVRTYSWKKDIPIEVCPISNQVLKLVSDLRNHPVATLMATGHPMVISSDDPAMFGAKGLSYDFYEVFMGIGGMKADLRTLKQLAMNSIKYSTLLESEKNTFMEIWKKRWDKFIADVATK

SEQ ID NO: 683 - protein, 482 aa, synthetic construct
  REGION 1..482: note = human ADA2 R219Q/S262N/K371A, mature numbering
IDETRAHLLLKEKMMRLGGRLVLNTKEELANERLMTLKIAEMKEAMRTLIFPPSMHFFQAKHLIERSQVFNILRMMPKGAALHLHDIGIVTMDWLVRNVTYRPHCHICFTPRGIMQFRFAHPTPRPSEKCSKWILLEDYRKRVQNVTEFDDSLLRNFTLVTQHPEVIYTNQNVVWSKFETIFFTISGLIHYAPVFRDYVFRSMQEFYEDNVLYMEIRAQLLPVYELSGEHHDEEWSVKTYQEVAQKFVETHPEFIGIKIIYNDHRSKDVAVIAESIRMAMGLRIKFPTVVAGFDLVGHEDTGHSLHDYKEALMIPAKDGVKLPYFFHAGETDWQGTSIDRNILDALMLNTTRIGHGFALSKHPAVRTYSWAKDIPIEVCPISNQVLKLVSDLRNHPVATLMATGHPMVISSDDPAMFGAKGLSYDFYEVFMGIGGMKADLRTLKQLAMNSIKYSTLLESEKNTFMEIWKKRWDKFIADVATK

SEQ ID NO: 684 - protein, 482 aa, synthetic construct
  REGION 1..482: note = human ADA2 R219Q/S262N/K372A, mature numbering
IDETRAHLLLKEKMMRLGGRLVLNTKEELANERLMTLKIAEMKEAMRTLIFPPSMHFFQAKHLIERSQVFNILRMMPKGAALHLHDIGIVTMDWLVRNVTYRPHCHICFTPRGIMQFRFAHPTPRPSEKCSKWILLEDYRKRVQNVTEFDDSLLRNFTLVTQHPEVIYTNQNVVWSKFETIFFTISGLIHYAPVFRDYVFRSMQEFYEDNVLYMEIRAQLLPVYELSGEHHDEEWSVKTYQEVAQKFVETHPEFIGIKIIYNDHRSKDVAVIAESIRMAMGLRIKFPTVVAGFDLVGHEDTGHSLHDYKEALMIPAKDGVKLPYFFHAGETDWQGTSIDRNILDALMLNTTRIGHGFALSKHPAVRTYSWKADIPIEVCPISNQVLKLVSDLRNHPVATLMATGHPMVISSDDPAMFGAKGLSYDFYEVFMGIGGMKADLRTLKQLAMNSIKYSTLLESEKNTFMEIWKKRWDKFIADVATK

SEQ ID NO: 685 - protein, 482 aa, synthetic construct
  REGION 1..482: note = human ADA2 R219Q/S262N/K372D, mature numbering
IDETRAHLLLKEKMMRLGGRLVLNTKEELANERLMTLKIAEMKEAMRTLIFPPSMHFFQAKHLIERSQVFNILRMMPKGAALHLHDIGIVTMDWLVRNVTYRPHCHICFTPRGIMQFRFAHPTPRPSEKCSKWILLEDYRKRVQNVTEFDDSLLRNFTLVTQHPEVIYTNQNVVWSKFETIFFTISGLIHYAPVFRDYVFRSMQEFYEDNVLYMEIRAQLLPVYELSGEHHDEEWSVKTYQEVAQKFVETHPEFIGIKIIYNDHRSKDVAVIAESIRMAMGLRIKFPTVVAGFDLVGHEDTGHSLHDYKEALMIPAKDGVKLPYFFHAGETDWQGTSIDRNILDALMLNTTRIGHGFALSKHPAVRTYSWKDDIPIEVCPISNQVLKLVSDLRNHPVATLMATGHPMVISSDDPAMFGAKGLSYDFYEVFMGIGGMKADLRTLKQLAMNSIKYSTLLESEKNTFMEIWKKRWDKFIADVATK

SEQ ID NO: 686 - protein, 482 aa, synthetic construct
  REGION 1..482: note = human ADA2 R219Q/S262N/K372E, mature numbering
IDETRAHLLLKEKMMRLGGRLVLNTKEELANERLMTLKIAEMKEAMRTLIFPPSMHFFQAKHLIERSQVFNILRMMPKGAALHLHDIGIVTMDWLVRNVTYRPHCHICFTPRGIMQFRFAHPTPRPSEKCSKWILLEDYRKRVQNVTEFDDSLLRNFTLVTQHPEVIYTNQNVVWSKFETIFFTISGLIHYAPVFRDYVFRSMQEFYEDNVLYMEIRAQLLPVYELSGEHHDEEWSVKTYQEVAQKFVETHPEFIGIKIIYNDHRSKDVAVIAESIRMAMGLRIKFPTVVAGFDLVGHEDTGHSLHDYKEALMIPAKDGVKLPYFFHAGETDWQGTSIDRNILDALMLNTTRIGHGFALSKHPAVRTYSWKEDIPIEVCPISNQVLKLVSDLRNHPVATLMATGHPMVISSDDPAMFGAKGLSYDFYEVFMGIGGMKADLRTLKQLAMNSIKYSTLLESEKNTFMEIWKKRWDKFIADVATK

SEQ ID NO: 687 - protein, 482 aa, synthetic construct
  REGION 1..482: note = human ADA2 R219Q/S262N/K452A, mature numbering
IDETRAHLLLKEKMMRLGGRLVLNTKEELANERLMTLKIAEMKEAMRTLIFPPSMHFFQAKHLIERSQVFNILRMMPKGAALHLHDIGIVTMDWLVRNVTYRPHCHICFTPRGIMQFRFAHPTPRPSEKCSKWILLEDYRKRVQNVTEFDDSLLRNFTLVTQHPEVIYTNQNVVWSKFETIFFTISGLIHYAPVFRDYVFRSMQEFYEDNVLYMEIRAQLLPVYELSGEHHDEEWSVKTYQEVAQKFVETHPEFIGIKIIYNDHRSKDVAVIAESIRMAMGLRIKFPTVVAGFDLVGHEDTGHSLHDYKEALMIPAKDGVKLPYFFHAGETDWQGTSIDRNILDALMLNTTRIGHGFALSKHPAVRTYSWKKDIPIEVCPISNQVLKLVSDLRNHPVATLMATGHPMVISSDDPAMFGAKGLSYDFYEVFMGIGGMKADLRTLKQLAMNSIAYSTLLESEKNTFMEIWKKRWDKFIADVATK

SEQ ID NO: 688 - protein, 482 aa, synthetic construct
  REGION 1..482: note = human ADA2 R219Q/S262N/K452D, mature numbering
IDETRAHLLLKEKMMRLGGRLVLNTKEELANERLMTLKIAEMKEAMRTLIFPPSMHFFQAKHLIERSQVFNILRMMPKGAALHLHDIGIVTMDWLVRNVTYRPHCHICFTPRGIMQFRFAHPTPRPSEKCSKWILLEDYRKRVQNVTEFDDSLLRNFTLVTQHPEVIYTNQNVVWSKFETIFFTISGLIHYAPVFRDYVFRSMQEFYEDNVLYMEIRAQLLPVYELSGEHHDEEWSVKTYQEVAQKFVETHPEFIGIKIIYNDHRSKDVAVIAESIRMAMGLRIKFPTVVAGFDLVGHEDTGHSLHDYKEALMIPAKDGVKLPYFFHAGETDWQGTSIDRNILDALMLNTTRIGHGFALSKHPAVRTYSWKKDIPIEVCPISNQVLKLVSDLRNHPVATLMATGHPMVISSDDPAMFGAKGLSYDFYEVFMGIGGMKADLRTLKQLAMNSIDYSTLLESEKNTFMEIWKKRWDKFIADVATK

SEQ ID NO: 689 - protein, 482 aa, synthetic construct
  REGION 1..482: note = human ADA2 R219Q/S262N/K452E, mature numbering
IDETRAHLLLKEKMMRLGGRLVLNTKEELANERLMTLKIAEMKEAMRTLIFPPSMHFFQAKHLIERSQVFNILRMMPKGAALHLHDIGIVTMDWLVRNVTYRPHCHICFTPRGIMQFRFAHPTPRPSEKCSKWILLEDYRKRVQNVTEFDDSLLRNFTLVTQHPEVIYTNQNVVWSKFETIFFTISGLIHYAPVFRDYVFRSMQEFYEDNVLYMEIRAQLLPVYELSGEHHDEEWSVKTYQEVAQKFVETHPEFIGIKIIYNDHRSKDVAVIAESIRMAMGLRIKFPTVVAGFDLVGHEDTGHSLHDYKEALMIPAKDGVKLPYFFHAGETDWQGTSIDRNILDALMLNTTRIGHGFALSKHPAVRTYSWKKDIPIEVCPISNQVLKLVSDLRNHPVATLMATGHPMVISSDDPAMFGAKGLSYDFYEVFMGIGGMKADLRTLKQLAMNSIEYSTLLESEKNTFMEIWKKRWDKFIADVATK

SEQ ID NO: 690 - protein, 482 aa, synthetic construct
  REGION 1..482: note = human ADA2 R219Q/S262N/R20A, mature numbering
IDETRAHLLLKEKMMRLGGALVLNTKEELANERLMTLKIAEMKEAMRTLIFPPSMHFFQAKHLIERSQVFNILRMMPKGAALHLHDIGIVTMDWLVRNVTYRPHCHICFTPRGIMQFRFAHPTPRPSEKCSKWILLEDYRKRVQNVTEFDDSLLRNFTLVTQHPEVIYTNQNVVWSKFETIFFTISGLIHYAPVFRDYVFRSMQEFYEDNVLYMEIRAQLLPVYELSGEHHDEEWSVKTYQEVAQKFVETHPEFIGIKIIYNDHRSKDVAVIAESIRMAMGLRIKFPTVVAGFDLVGHEDTGHSLHDYKEALMIPAKDGVKLPYFFHAGETDWQGTSIDRNILDALMLNTTRIGHGFALSKHPAVRTYSWKKDIPIEVCPISNQVLKLVSDLRNHPVATLMATGHPMVISSDDPAMFGAKGLSYDFYEVFMGIGGMKADLRTLKQLAMNSIKYSTLLESEKNTFMEIWKKRWDKFIADVATK

SEQ ID NO: 691 - protein, 482 aa, synthetic construct
  REGION 1..482: note = human ADA2 R219Q/S262N/R20D, mature numbering
IDETRAHLLLKEKMMRLGGDLVLNTKEELANERLMTLKIAEMKEAMRTLIFPPSMHFFQAKHLIERSQVFNILRMMPKGAALHLHDIGIVTMDWLVRNVTYRPHCHICFTPRGIMQFRFAHPTPRPSEKCSKWILLEDYRKRVQNVTEFDDSLLRNFTLVTQHPEVIYTNQNVVWSKFETIFFTISGLIHYAPVFRDYVFRSMQEFYEDNVLYMEIRAQLLPVYELSGEHHDEEWSVKTYQEVAQKFVETHPEFIGIKIIYNDHRSKDVAVIAESIRMAMGLRIKFPTVVAGFDLVGHEDTGHSLHDYKEALMIPAKDGVKLPYFFHAGETDWQGTSIDRNILDALMLNTTRIGHGFALSKHPAVRTYSWKKDIPIEVCPISNQVLKLVSDLRNHPVATLMATGHPMVISSDDPAMFGAKGLSYDFYEVFMGIGGMKADLRTLKQLAMNSIKYSTLLESEKNTFMEIWKKRWDKFIADVATK

SEQ ID NO: 692 - protein, 482 aa, synthetic construct
  REGION 1..482: note = human ADA2 R219Q/S262N/R366A, mature numbering
IDETRAHLLLKEKMMRLGGRLVLNTKEELANERLMTLKIAEMKEAMRTLIFPPSMHFFQAKHLIERSQVFNILRMMPKGAALHLHDIGIVTMDWLVRNVTYRPHCHICFTPRGIMQFRFAHPTPRPSEKCSKWILLEDYRKRVQNVTEFDDSLLRNFTLVTQHPEVIYTNQNVVWSKFETIFFTISGLIHYAPVFRDYVFRSMQEFYEDNVLYMEIRAQLLPVYELSGEHHDEEWSVKTYQEVAQKFVETHPEFIGIKIIYNDHRSKDVAVIAESIRMAMGLRIKFPTVVAGFDLVGHEDTGHSLHDYKEALMIPAKDGVKLPYFFHAGETDWQGTSIDRNILDALMLNTTRIGHGFALSKHPAVATYSWKKDIPIEVCPISNQVLKLVSDLRNHPVATLMATGHPMVISSDDPAMFGAKGLSYDFYEVFMGIGGMKADLRTLKQLAMNSIKYSTLLESEKNTFMEIWKKRWDKFIADVATK

SEQ ID NO: 693 - protein, 482 aa, synthetic construct
  REGION 1..482: note = human ADA2 R219Q/S262N/R366D, mature numbering
IDETRAHLLLKEKMMRLGGRLVLNTKEELANERLMTLKIAEMKEAMRTLIFPPSMHFFQAKHLIERSQVFNILRMMPKGAALHLHDIGIVTMDWLVRNVTYRPHCHICFTPRGIMQFRFAHPTPRPSEKCSKWILLEDYRKRVQNVTEFDDSLLRNFTLVTQHPEVIYTNQNVVWSKFETIFFTISGLIHYAPVFRDYVFRSMQEFYEDNVLYMEIRAQLLPVYELSGEHHDEEWSVKTYQEVAQKFVETHPEFIGIKIIYNDHRSKDVAVIAESIRMAMGLRIKFPTVVAGFDLVGHEDTGHSLHDYKEALMIPAKDGVKLPYFFHAGETDWQGTSIDRNILDALMLNTTRIGHGFALSKHPAVDTYSWKKDIPIEVCPISNQVLKLVSDLRNHPVATLMATGHPMVISSDDPAMFGAKGLSYDFYEVFMGIGGMKADLRTLKQLAMNSIKYSTLLESEKNTFMEIWKKRWDKFIADVATK

SEQ ID NO: 694 - protein, 482 aa, synthetic construct
  REGION 1..482: note = human ADA2 R219Q/S262N/R366E, mature numbering
IDETRAHLLLKEKMMRLGGRLVLNTKEELANERLMTLKIAEMKEAMRTLIFPPSMHFFQAKHLIERSQVFNILRMMPKGAALHLHDIGIVTMDWLVRNVTYRPHCHICFTPRGIMQFRFAHPTPRPSEKCSKWILLEDYRKRVQNVTEFDDSLLRNFTLVTQHPEVIYTNQNVVWSKFETIFFTISGLIHYAPVFRDYVFRSMQEFYEDNVLYMEIRAQLLPVYELSGEHHDEEWSVKTYQEVAQKFVETHPEFIGIKIIYNDHRSKDVAVIAESIRMAMGLRIKFPTVVAGFDLVGHEDTGHSLHDYKEALMIPAKDGVKLPYFFHAGETDWQGTSIDRNILDALMLNTTRIGHGFALSKHPAVETYSWKKDIPIEVCPISNQVLKLVSDLRNHPVATLMATGHPMVISSDDPAMFGAKGLSYDFYEVFMGIGGMKADLRTLKQLAMNSIKYSTLLESEKNTFMEIWKKRWDKFIADVATK

SEQ ID NO: 695 - protein, 482 aa, synthetic construct
  REGION 1..482: note = human ADA2 R219Q/S262N/H264A, mature numbering
IDETRAHLLLKEKMMRLGGRLVLNTKEELANERLMTLKIAEMKEAMRTLIFPPSMHFFQAKHLIERSQVFNILRMMPKGAALHLHDIGIVTMDWLVRNVTYRPHCHICFTPRGIMQFRFAHPTPRPSEKCSKWILLEDYRKRVQNVTEFDDSLLRNFTLVTQHPEVIYTNQNVVWSKFETIFFTISGLIHYAPVFRDYVFRSMQEFYEDNVLYMEIRAQLLPVYELSGEHHDEEWSVKTYQEVAQKFVETHPEFIGIKIIYNDARSKDVAVIAESIRMAMGLRIKFPTVVAGFDLVGHEDTGHSLHDYKEALMIPAKDGVKLPYFFHAGETDWQGTSIDRNILDALMLNTTRIGHGFALSKHPAVRTYSWKKDIPIEVCPISNQVLKLVSDLRNHPVATLMATGHPMVISSDDPAMFGAKGLSYDFYEVFMGIGGMKADLRTLKQLAMNSIKYSTLLESEKNTFMEIWKKRWDKFIADVATK

SEQ ID NO: 696 - protein, 482 aa, synthetic construct
  REGION 1..482: note = human ADA2 R219Q/S262N/H264Q, mature numbering
IDETRAHLLLKEKMMRLGGRLVLNTKEELANERLMTLKIAEMKEAMRTLIFPPSMHFFQAKHLIERSQVFNILRMMPKGAALHLHDIGIVTMDWLVRNVTYRPHCHICFTPRGIMQFRFAHPTPRPSEKCSKWILLEDYRKRVQNVTEFDDSLLRNFTLVTQHPEVIYTNQNVVWSKFETIFFTISGLIHYAPVFRDYVFRSMQEFYEDNVLYMEIRAQLLPVYELSGEHHDEEWSVKTYQEVAQKFVETHPEFIGIKIIYNDQRSKDVAVIAESIRMAMGLRIKFPTVVAGFDLVGHEDTGHSLHDYKEALMIPAKDGVKLPYFFHAGETDWQGTSIDRNILDALMLNTTRIGHGFALSKHPAVRTYSWKKDIPIEVCPISNQVLKLVSDLRNHPVATLMATGHPMVISSDDPAMFGAKGLSYDFYEVFMGIGGMKADLRTLKQLAMNSIKYSTLLESEKNTFMEIWKKRWDKFIADVATK

SEQ ID NO: 697 - protein, 482 aa, synthetic construct
  REGION 1..482: note = human ADA2 R219Q/S262N/H264N, mature numbering
IDETRAHLLLKEKMMRLGGRLVLNTKEELANERLMTLKIAEMKEAMRTLIFPPSMHFFQAKHLIERSQVFNILRMMPKGAALHLHDIGIVTMDWLVRNVTYRPHCHICFTPRGIMQFRFAHPTPRPSEKCSKWILLEDYRKRVQNVTEFDDSLLRNFTLVTQHPEVIYTNQNVVWSKFETIFFTISGLIHYAPVFRDYVFRSMQEFYEDNVLYMEIRAQLLPVYELSGEHHDEEWSVKTYQEVAQKFVETHPEFIGIKIIYNDNRSKDVAVIAESIRMAMGLRIKFPTVVAGFDLVGHEDTGHSLHDYKEALMIPAKDGVKLPYFFHAGETDWQGTSIDRNILDALMLNTTRIGHGFALSKHPAVRTYSWKKDIPIEVCPISNQVLKLVSDLRNHPVATLMATGHPMVISSDDPAMFGAKGLSYDFYEVFMGIGGMKADLRTLKQLAMNSIKYSTLLESEKNTFMEIWKKRWDKFIADVATK

SEQ ID NO: 698 - protein, 482 aa, synthetic construct
  REGION 1..482: note = human ADA2 R219Q/S262N/H264G, mature numbering
IDETRAHLLLKEKMMRLGGRLVLNTKEELANERLMTLKIAEMKEAMRTLIFPPSMHFFQAKHLIERSQVFNILRMMPKGAALHLHDIGIVTMDWLVRNVTYRPHCHICFTPRGIMQFRFAHPTPRPSEKCSKWILLEDYRKRVQNVTEFDDSLLRNFTLVTQHPEVIYTNQNVVWSKFETIFFTISGLIHYAPVFRDYVFRSMQEFYEDNVLYMEIRAQLLPVYELSGEHHDEEWSVKTYQEVAQKFVETHPEFIGIKIIYNDGRSKDVAVIAESIRMAMGLRIKFPTVVAGFDLVGHEDTGHSLHDYKEALMIPAKDGVKLPYFFHAGETDWQGTSIDRNILDALMLNTTRIGHGFALSKHPAVRTYSWKKDIPIEVCPISNQVLKLVSDLRNHPVATLMATGHPMVISSDDPAMFGAKGLSYDFYEVFMGIGGMKADLRTLKQLAMNSIKYSTLLESEKNTFMEIWKKRWDKFIADVATK

SEQ ID NO: 699 - protein, 482 aa, synthetic construct
  REGION 1..482: note = human ADA2 R219K/S262N, mature numbering
IDETRAHLLLKEKMMRLGGRLVLNTKEELANERLMTLKIAEMKEAMRTLIFPPSMHFFQAKHLIERSQVFNILRMMPKGAALHLHDIGIVTMDWLVRNVTYRPHCHICFTPRGIMQFRFAHPTPRPSEKCSKWILLEDYRKRVQNVTEFDDSLLRNFTLVTQHPEVIYTNQNVVWSKFETIFFTISGLIHYAPVFRDYVFRSMQEFYEDNVLYMEIRAKLLPVYELSGEHHDEEWSVKTYQEVAQKFVETHPEFIGIKIIYNDHRSKDVAVIAESIRMAMGLRIKFPTVVAGFDLVGHEDTGHSLHDYKEALMIPAKDGVKLPYFFHAGETDWQGTSIDRNILDALMLNTTRIGHGFALSKHPAVRTYSWKKDIPIEVCPISNQVLKLVSDLRNHPVATLMATGHPMVISSDDPAMFGAKGLSYDFYEVFMGIGGMKADLRTLKQLAMNSIKYSTLLESEKNTFMEIWKKRWDKFIADVATK

SEQ ID NO: 700 - protein, 482 aa, synthetic construct
  REGION 1..482: note = human ADA2 R219N/S262N, mature numbering
IDETRAHLLLKEKMMRLGGRLVLNTKEELANERLMTLKIAEMKEAMRTLIFPPSMHFFQAKHLIERSQVFNILRMMPKGAALHLHDIGIVTMDWLVRNVTYRPHCHICFTPRGIMQFRFAHPTPRPSEKCSKWILLEDYRKRVQNVTEFDDSLLRNFTLVTQHPEVIYTNQNVVWSKFETIFFTISGLIHYAPVFRDYVFRSMQEFYEDNVLYMEIRANLLPVYELSGEHHDEEWSVKTYQEVAQKFVETHPEFIGIKIIYNDHRSKDVAVIAESIRMAMGLRIKFPTVVAGFDLVGHEDTGHSLHDYKEALMIPAKDGVKLPYFFHAGETDWQGTSIDRNILDALMLNTTRIGHGFALSKHPAVRTYSWKKDIPIEVCPISNQVLKLVSDLRNHPVATLMATGHPMVISSDDPAMFGAKGLSYDFYEVFMGIGGMKADLRTLKQLAMNSIKYSTLLESEKNTFMEIWKKRWDKFIADVATK

SEQ ID NO: 701 - protein, 482 aa, synthetic construct
  REGION 1..482: note = human ADA2 R219A/S262N, mature numbering
IDETRAHLLLKEKMMRLGGRLVLNTKEELANERLMTLKIAEMKEAMRTLIFPPSMHFFQAKHLIERSQVFNILRMMPKGAALHLHDIGIVTMDWLVRNVTYRPHCHICFTPRGIMQFRFAHPTPRPSEKCSKWILLEDYRKRVQNVTEFDDSLLRNFTLVTQHPEVIYTNQNVVWSKFETIFFTISGLIHYAPVFRDYVFRSMQEFYEDNVLYMEIRAALLPVYELSGEHHDEEWSVKTYQEVAQKFVETHPEFIGIKIIYNDHRSKDVAVIAESIRMAMGLRIKFPTVVAGFDLVGHEDTGHSLHDYKEALMIPAKDGVKLPYFFHAGETDWQGTSIDRNILDALMLNTTRIGHGFALSKHPAVRTYSWKKDIPIEVCPISNQVLKLVSDLRNHPVATLMATGHPMVISSDDPAMFGAKGLSYDFYEVFMGIGGMKADLRTLKQLAMNSIKYSTLLESEKNTFMEIWKKRWDKFIADVATK

SEQ ID NO: 702 - protein, 482 aa, synthetic construct
  REGION 1..482: note = human ADA2 R219Q/S262N/L221A, mature numbering
IDETRAHLLLKEKMMRLGGRLVLNTKEELANERLMTLKIAEMKEAMRTLIFPPSMHFFQAKHLIERSQVFNILRMMPKGAALHLHDIGIVTMDWLVRNVTYRPHCHICFTPRGIMQFRFAHPTPRPSEKCSKWILLEDYRKRVQNVTEFDDSLLRNFTLVTQHPEVIYTNQNVVWSKFETIFFTISGLIHYAPVFRDYVFRSMQEFYEDNVLYMEIRAQLAPVYELSGEHHDEEWSVKTYQEVAQKFVETHPEFIGIKIIYNDHRSKDVAVIAESIRMAMGLRIKFPTVVAGFDLVGHEDTGHSLHDYKEALMIPAKDGVKLPYFFHAGETDWQGTSIDRNILDALMLNTTRIGHGFALSKHPAVRTYSWKKDIPIEVCPISNQVLKLVSDLRNHPVATLMATGHPMVISSDDPAMFGAKGLSYDFYEVFMGIGGMKADLRTLKQLAMNSIKYSTLLESEKNTFMEIWKKRWDKFIADVATK

SEQ ID NO: 703 - protein, 482 aa, synthetic construct
  REGION 1..482: note = human ADA2 R219Q/S262N/L221V, mature numbering
IDETRAHLLLKEKMMRLGGRLVLNTKEELANERLMTLKIAEMKEAMRTLIFPPSMHFFQAKHLIERSQVFNILRMMPKGAALHLHDIGIVTMDWLVRNVTYRPHCHICFTPRGIMQFRFAHPTPRPSEKCSKWILLEDYRKRVQNVTEFDDSLLRNFTLVTQHPEVIYTNQNVVWSKFETIFFTISGLIHYAPVFRDYVFRSMQEFYEDNVLYMEIRAQLVPVYELSGEHHDEEWSVKTYQEVAQKFVETHPEFIGIKIIYNDHRSKDVAVIAESIRMAMGLRIKFPTVVAGFDLVGHEDTGHSLHDYKEALMIPAKDGVKLPYFFHAGETDWQGTSIDRNILDALMLNTTRIGHGFALSKHPAVRTYSWKKDIPIEVCPISNQVLKLVSDLRNHPVATLMATGHPMVISSDDPAMFGAKGLSYDFYEVFMGIGGMKADLRTLKQLAMNSIKYSTLLESEKNTFMEIWKKRWDKFIADVATK

SEQ ID NO: 704 - protein, 482 aa, synthetic construct
  REGION 1..482: note = human ADA2 R219Q/S262N/L221G, mature numbering
IDETRAHLLLKEKMMRLGGRLVLNTKEELANERLMTLKIAEMKEAMRTLIFPPSMHFFQAKHLIERSQVFNILRMMPKGAALHLHDIGIVTMDWLVRNVTYRPHCHICFTPRGIMQFRFAHPTPRPSEKCSKWILLEDYRKRVQNVTEFDDSLLRNFTLVTQHPEVIYTNQNVVWSKFETIFFTISGLIHYAPVFRDYVFRSMQEFYEDNVLYMEIRAQLGPVYELSGEHHDEEWSVKTYQEVAQKFVETHPEFIGIKIIYNDHRSKDVAVIAESIRMAMGLRIKFPTVVAGFDLVGHEDTGHSLHDYKEALMIPAKDGVKLPYFFHAGETDWQGTSIDRNILDALMLNTTRIGHGFALSKHPAVRTYSWKKDIPIEVCPISNQVLKLVSDLRNHPVATLMATGHPMVISSDDPAMFGAKGLSYDFYEVFMGIGGMKADLRTLKQLAMNSIKYSTLLESEKNTFMEIWKKRWDKFIADVATK

SEQ ID NO: 705 - protein, 482 aa, synthetic construct
  REGION 1..482: note = human ADA2 R219Q/S262N/E179D, mature numbering
IDETRAHLLLKEKMMRLGGRLVLNTKEELANERLMTLKIAEMKEAMRTLIFPPSMHFFQAKHLIERSQVFNILRMMPKGAALHLHDIGIVTMDWLVRNVTYRPHCHICFTPRGIMQFRFAHPTPRPSEKCSKWILLEDYRKRVQNVTEFDDSLLRNFTLVTQHPEVIYTNQNVVWSKFDTIFFTISGLIHYAPVFRDYVFRSMQEFYEDNVLYMEIRAQLLPVYELSGEHHDEEWSVKTYQEVAQKFVETHPEFIGIKIIYNDHRSKDVAVIAESIRMAMGLRIKFPTVVAGFDLVGHEDTGHSLHDYKEALMIPAKDGVKLPYFFHAGETDWQGTSIDRNILDALMLNTTRIGHGFALSKHPAVRTYSWKKDIPIEVCPISNQVLKLVSDLRNHPVATLMATGHPMVISSDDPAMFGAKGLSYDFYEVFMGIGGMKADLRTLKQLAMNSIKYSTLLESEKNTFMEIWKKRWDKFIADVATK

SEQ ID NO: 706 - protein, 482 aa, synthetic construct
  REGION 1..482: note = human ADA2 R219Q/S262N/E179A, mature numbering
IDETRAHLLLKEKMMRLGGRLVLNTKEELANERLMTLKIAEMKEAMRTLIFPPSMHFFQAKHLIERSQVFNILRMMPKGAALHLHDIGIVTMDWLVRNVTYRPHCHICFTPRGIMQFRFAHPTPRPSEKCSKWILLEDYRKRVQNVTEFDDSLLRNFTLVTQHPEVIYTNQNVVWSKFATIFFTISGLIHYAPVFRDYVFRSMQEFYEDNVLYMEIRAQLLPVYELSGEHHDEEWSVKTYQEVAQKFVETHPEFIGIKIIYNDHRSKDVAVIAESIRMAMGLRIKFPTVVAGFDLVGHEDTGHSLHDYKEALMIPAKDGVKLPYFFHAGETDWQGTSIDRNILDALMLNTTRIGHGFALSKHPAVRTYSWKKDIPIEVCPISNQVLKLVSDLRNHPVATLMATGHPMVISSDDPAMFGAKGLSYDFYEVFMGIGGMKADLRTLKQLAMNSIKYSTLLESEKNTFMEIWKKRWDKFIADVATK

SEQ ID NO: 707 - protein, 482 aa, synthetic construct
  REGION 1..482: note = human ADA2 R219Q/S262N/E179S, mature numbering
IDETRAHLLLKEKMMRLGGRLVLNTKEELANERLMTLKIAEMKEAMRTLIFPPSMHFFQAKHLIERSQVFNILRMMPKGAALHLHDIGIVTMDWLVRNVTYRPHCHICFTPRGIMQFRFAHPTPRPSEKCSKWILLEDYRKRVQNVTEFDDSLLRNFTLVTQHPEVIYTNQNVVWSKFSTIFFTISGLIHYAPVFRDYVFRSMQEFYEDNVLYMEIRAQLLPVYELSGEHHDEEWSVKTYQEVAQKFVETHPEFIGIKIIYNDHRSKDVAVIAESIRMAMGLRIKFPTVVAGFDLVGHEDTGHSLHDYKEALMIPAKDGVKLPYFFHAGETDWQGTSIDRNILDALMLNTTRIGHGFALSKHPAVRTYSWKKDIPIEVCPISNQVLKLVSDLRNHPVATLMATGHPMVISSDDPAMFGAKGLSYDFYEVFMGIGGMKADLRTLKQLAMNSIKYSTLLESEKNTFMEIWKKRWDKFIADVATK

SEQ ID NO: 708 - protein, 482 aa, synthetic construct
  REGION 1..482: note = human ADA2 R219Q/S262N/E179T, mature numbering
IDETRAHLLLKEKMMRLGGRLVLNTKEELANERLMTLKIAEMKEAMRTLIFPPSMHFFQAKHLIERSQVFNILRMMPKGAALHLHDIGIVTMDWLVRNVTYRPHCHICFTPRGIMQFRFAHPTPRPSEKCSKWILLEDYRKRVQNVTEFDDSLLRNFTLVTQHPEVIYTNQNVVWSKFTTIFFTISGLIHYAPVFRDYVFRSMQEFYEDNVLYMEIRAQLLPVYELSGEHHDEEWSVKTYQEVAQKFVETHPEFIGIKIIYNDHRSKDVAVIAESIRMAMGLRIKFPTVVAGFDLVGHEDTGHSLHDYKEALMIPAKDGVKLPYFFHAGETDWQGTSIDRNILDALMLNTTRIGHGFALSKHPAVRTYSWKKDIPIEVCPISNQVLKLVSDLRNHPVATLMATGHPMVISSDDPAMFGAKGLSYDFYEVFMGIGGMKADLRTLKQLAMNSIKYSTLLESEKNTFMEIWKKRWDKFIADVATK

SEQ ID NO: 709 - protein, 482 aa, synthetic construct
  REGION 1..482: note = human ADA2 R219Q/S262N/E179V, mature numbering
IDETRAHLLLKEKMMRLGGRLVLNTKEELANERLMTLKIAEMKEAMRTLIFPPSMHFFQAKHLIERSQVFNILRMMPKGAALHLHDIGIVTMDWLVRNVTYRPHCHICFTPRGIMQFRFAHPTPRPSEKCSKWILLEDYRKRVQNVTEFDDSLLRNFTLVTQHPEVIYTNQNVVWSKFVTIFFTISGLIHYAPVFRDYVFRSMQEFYEDNVLYMEIRAQLLPVYELSGEHHDEEWSVKTYQEVAQKFVETHPEFIGIKIIYNDHRSKDVAVIAESIRMAMGLRIKFPTVVAGFDLVGHEDTGHSLHDYKEALMIPAKDGVKLPYFFHAGETDWQGTSIDRNILDALMLNTTRIGHGFALSKHPAVRTYSWKKDIPIEVCPISNQVLKLVSDLRNHPVATLMATGHPMVISSDDPAMFGAKGLSYDFYEVFMGIGGMKADLRTLKQLAMNSIKYSTLLESEKNTFMEIWKKRWDKFIADVATK

SEQ ID NO: 710 - protein, 482 aa, synthetic construct
  REGION 1..482: note = human ADA2 R219Q/S262N/E179G, mature numbering
IDETRAHLLLKEKMMRLGGRLVLNTKEELANERLMTLKIAEMKEAMRTLIFPPSMHFFQAKHLIERSQVFNILRMMPKGAALHLHDIGIVTMDWLVRNVTYRPHCHICFTPRGIMQFRFAHPTPRPSEKCSKWILLEDYRKRVQNVTEFDDSLLRNFTLVTQHPEVIYTNQNVVWSKFGTIFFTISGLIHYAPVFRDYVFRSMQEFYEDNVLYMEIRAQLLPVYELSGEHHDEEWSVKTYQEVAQKFVETHPEFIGIKIIYNDHRSKDVAVIAESIRMAMGLRIKFPTVVAGFDLVGHEDTGHSLHDYKEALMIPAKDGVKLPYFFHAGETDWQGTSIDRNILDALMLNTTRIGHGFALSKHPAVRTYSWKKDIPIEVCPISNQVLKLVSDLRNHPVATLMATGHPMVISSDDPAMFGAKGLSYDFYEVFMGIGGMKADLRTLKQLAMNSIKYSTLLESEKNTFMEIWKKRWDKFIADVATK

SEQ ID NO: 711 - protein, 482 aa, synthetic construct
  REGION 1..482: note = human ADA2 R219Q/S262A, mature numbering
IDETRAHLLLKEKMMRLGGRLVLNTKEELANERLMTLKIAEMKEAMRTLIFPPSMHFFQAKHLIERSQVFNILRMMPKGAALHLHDIGIVTMDWLVRNVTYRPHCHICFTPRGIMQFRFAHPTPRPSEKCSKWILLEDYRKRVQNVTEFDDSLLRNFTLVTQHPEVIYTNQNVVWSKFETIFFTISGLIHYAPVFRDYVFRSMQEFYEDNVLYMEIRAQLLPVYELSGEHHDEEWSVKTYQEVAQKFVETHPEFIGIKIIYADHRSKDVAVIAESIRMAMGLRIKFPTVVAGFDLVGHEDTGHSLHDYKEALMIPAKDGVKLPYFFHAGETDWQGTSIDRNILDALMLNTTRIGHGFALSKHPAVRTYSWKKDIPIEVCPISNQVLKLVSDLRNHPVATLMATGHPMVISSDDPAMFGAKGLSYDFYEVFMGIGGMKADLRTLKQLAMNSIKYSTLLESEKNTFMEIWKKRWDKFIADVATK

SEQ ID NO: 712 - protein, 482 aa, synthetic construct
  REGION 1..482: note = human ADA2 R219Q/S262V, mature numbering
IDETRAHLLLKEKMMRLGGRLVLNTKEELANERLMTLKIAEMKEAMRTLIFPPSMHFFQAKHLIERSQVFNILRMMPKGAALHLHDIGIVTMDWLVRNVTYRPHCHICFTPRGIMQFRFAHPTPRPSEKCSKWILLEDYRKRVQNVTEFDDSLLRNFTLVTQHPEVIYTNQNVVWSKFETIFFTISGLIHYAPVFRDYVFRSMQEFYEDNVLYMEIRAQLLPVYELSGEHHDEEWSVKTYQEVAQKFVETHPEFIGIKIIYVDHRSKDVAVIAESIRMAMGLRIKFPTVVAGFDLVGHEDTGHSLHDYKEALMIPAKDGVKLPYFFHAGETDWQGTSIDRNILDALMLNTTRIGHGFALSKHPAVRTYSWKKDIPIEVCPISNQVLKLVSDLRNHPVATLMATGHPMVISSDDPAMFGAKGLSYDFYEVFMGIGGMKADLRTLKQLAMNSIKYSTLLESEKNTFMEIWKKRWDKFIADVATK

SEQ ID NO: 713 - protein, 482 aa, synthetic construct
  REGION 1..482: note = human ADA2 R219Q/S262M, mature numbering
IDETRAHLLLKEKMMRLGGRLVLNTKEELANERLMTLKIAEMKEAMRTLIFPPSMHFFQAKHLIERSQVFNILRMMPKGAALHLHDIGIVTMDWLVRNVTYRPHCHICFTPRGIMQFRFAHPTPRPSEKCSKWILLEDYRKRVQNVTEFDDSLLRNFTLVTQHPEVIYTNQNVVWSKFETIFFTISGLIHYAPVFRDYVFRSMQEFYEDNVLYMEIRAQLLPVYELSGEHHDEEWSVKTYQEVAQKFVETHPEFIGIKIIYMDHRSKDVAVIAESIRMAMGLRIKFPTVVAGFDLVGHEDTGHSLHDYKEALMIPAKDGVKLPYFFHAGETDWQGTSIDRNILDALMLNTTRIGHGFALSKHPAVRTYSWKKDIPIEVCPISNQVLKLVSDLRNHPVATLMATGHPMVISSDDPAMFGAKGLSYDFYEVFMGIGGMKADLRTLKQLAMNSIKYSTLLESEKNTFMEIWKKRWDKFIADVATK

SEQ ID NO: 714 - protein, 482 aa, synthetic construct
  REGION 1..482: note = human ADA2 R219Q/S262N/K11A/R20A, mature numbering
IDETRAHLLLAEKMMRLGGALVLNTKEELANERLMTLKIAEMKEAMRTLIFPPSMHFFQAKHLIERSQVFNILRMMPKGAALHLHDIGIVTMDWLVRNVTYRPHCHICFTPRGIMQFRFAHPTPRPSEKCSKWILLEDYRKRVQNVTEFDDSLLRNFTLVTQHPEVIYTNQNVVWSKFETIFFTISGLIHYAPVFRDYVFRSMQEFYEDNVLYMEIRAQLLPVYELSGEHHDEEWSVKTYQEVAQKFVETHPEFIGIKIIYNDHRSKDVAVIAESIRMAMGLRIKFPTVVAGFDLVGHEDTGHSLHDYKEALMIPAKDGVKLPYFFHAGETDWQGTSIDRNILDALMLNTTRIGHGFALSKHPAVRTYSWKKDIPIEVCPISNQVLKLVSDLRNHPVATLMATGHPMVISSDDPAMFGAKGLSYDFYEVFMGIGGMKADLRTLKQLAMNSIKYSTLLESEKNTFMEIWKKRWDKFIADVATK

SEQ ID NO: 715 - protein, 482 aa, synthetic construct
  REGION 1..482: note = human ADA2 R219Q/S262N/K11A/R20A/K371A, maturenumbering
IDETRAHLLLAEKMMRLGGALVLNTKEELANERLMTLKIAEMKEAMRTLIFPPSMHFFQAKHLIERSQVFNILRMMPKGAALHLHDIGIVTMDWLVRNVTYRPHCHICFTPRGIMQFRFAHPTPRPSEKCSKWILLEDYRKRVQNVTEFDDSLLRNFTLVTQHPEVIYTNQNVVWSKFETIFFTISGLIHYAPVFRDYVFRSMQEFYEDNVLYMEIRAQLLPVYELSGEHHDEEWSVKTYQEVAQKFVETHPEFIGIKIIYNDHRSKDVAVIAESIRMAMGLRIKFPTVVAGFDLVGHEDTGHSLHDYKEALMIPAKDGVKLPYFFHAGETDWQGTSIDRNILDALMLNTTRIGHGFALSKHPAVRTYSWAKDIPIEVCPISNQVLKLVSDLRNHPVATLMATGHPMVISSDDPAMFGAKGLSYDFYEVFMGIGGMKADLRTLKQLAMNSIKYSTLLESEKNTFMEIWKKRWDKFIADVATK

SEQ ID NO: 716 - protein, 482 aa, synthetic construct
  REGION 1..482: note = human ADA2 R219Q/S262N/R20A/K371A, maturenumbering
IDETRAHLLLKEKMMRLGGALVLNTKEELANERLMTLKIAEMKEAMRTLIFPPSMHFFQAKHLIERSQVFNILRMMPKGAALHLHDIGIVTMDWLVRNVTYRPHCHICFTPRGIMQFRFAHPTPRPSEKCSKWILLEDYRKRVQNVTEFDDSLLRNFTLVTQHPEVIYTNQNVVWSKFETIFFTISGLIHYAPVFRDYVFRSMQEFYEDNVLYMEIRAQLLPVYELSGEHHDEEWSVKTYQEVAQKFVETHPEFIGIKIIYNDHRSKDVAVIAESIRMAMGLRIKFPTVVAGFDLVGHEDTGHSLHDYKEALMIPAKDGVKLPYFFHAGETDWQGTSIDRNILDALMLNTTRIGHGFALSKHPAVRTYSWAKDIPIEVCPISNQVLKLVSDLRNHPVATLMATGHPMVISSDDPAMFGAKGLSYDFYEVFMGIGGMKADLRTLKQLAMNSIKYSTLLESEKNTFMEIWKKRWDKFIADVATK

SEQ ID NO: 717 - protein, 482 aa, synthetic construct
  REGION 1..482: note = human ADA2 R219Q/S262N/K11A/K371A, maturenumbering
IDETRAHLLLAEKMMRLGGRLVLNTKEELANERLMTLKIAEMKEAMRTLIFPPSMHFFQAKHLIERSQVFNILRMMPKGAALHLHDIGIVTMDWLVRNVTYRPHCHICFTPRGIMQFRFAHPTPRPSEKCSKWILLEDYRKRVQNVTEFDDSLLRNFTLVTQHPEVIYTNQNVVWSKFETIFFTISGLIHYAPVFRDYVFRSMQEFYEDNVLYMEIRAQLLPVYELSGEHHDEEWSVKTYQEVAQKFVETHPEFIGIKIIYNDHRSKDVAVIAESIRMAMGLRIKFPTVVAGFDLVGHEDTGHSLHDYKEALMIPAKDGVKLPYFFHAGETDWQGTSIDRNILDALMLNTTRIGHGFALSKHPAVRTYSWAKDIPIEVCPISNQVLKLVSDLRNHPVATLMATGHPMVISSDDPAMFGAKGLSYDFYEVFMGIGGMKADLRTLKQLAMNSIKYSTLLESEKNTFMEIWKKRWDKFIADVATK

SEQ ID NO: 718 - protein, 482 aa, synthetic construct
  REGION 1..482: note = human ADA2 R219Q/S262N/K26A, mature numbering
IDETRAHLLLKEKMMRLGGRLVLNTAEELANERLMTLKIAEMKEAMRTLIFPPSMHFFQAKHLIERSQVFNILRMMPKGAALHLHDIGIVTMDWLVRNVTYRPHCHICFTPRGIMQFRFAHPTPRPSEKCSKWILLEDYRKRVQNVTEFDDSLLRNFTLVTQHPEVIYTNQNVVWSKFETIFFTISGLIHYAPVFRDYVFRSMQEFYEDNVLYMEIRAQLLPVYELSGEHHDEEWSVKTYQEVAQKFVETHPEFIGIKIIYNDHRSKDVAVIAESIRMAMGLRIKFPTVVAGFDLVGHEDTGHSLHDYKEALMIPAKDGVKLPYFFHAGETDWQGTSIDRNILDALMLNTTRIGHGFALSKHPAVRTYSWKKDIPIEVCPISNQVLKLVSDLRNHPVATLMATGHPMVISSDDPAMFGAKGLSYDFYEVFMGIGGMKADLRTLKQLAMNSIKYSTLLESEKNTFMEIWKKRWDKFIADVATK

SEQ ID NO: 719 - protein, 482 aa, synthetic construct
  REGION 1..482: note = human ADA2 R219Q/S262N/K26D, mature numbering
IDETRAHLLLKEKMMRLGGRLVLNTDEELANERLMTLKIAEMKEAMRTLIFPPSMHFFQAKHLIERSQVFNILRMMPKGAALHLHDIGIVTMDWLVRNVTYRPHCHICFTPRGIMQFRFAHPTPRPSEKCSKWILLEDYRKRVQNVTEFDDSLLRNFTLVTQHPEVIYTNQNVVWSKFETIFFTISGLIHYAPVFRDYVFRSMQEFYEDNVLYMEIRAQLLPVYELSGEHHDEEWSVKTYQEVAQKFVETHPEFIGIKIIYNDHRSKDVAVIAESIRMAMGLRIKFPTVVAGFDLVGHEDTGHSLHDYKEALMIPAKDGVKLPYFFHAGETDWQGTSIDRNILDALMLNTTRIGHGFALSKHPAVRTYSWKKDIPIEVCPISNQVLKLVSDLRNHPVATLMATGHPMVISSDDPAMFGAKGLSYDFYEVFMGIGGMKADLRTLKQLAMNSIKYSTLLESEKNTFMEIWKKRWDKFIADVATK

SEQ ID NO: 720 - protein, 482 aa, synthetic construct
  REGION 1..482: note = human ADA2 R219Q/S262N/K26E, mature numbering
IDETRAHLLLKEKMMRLGGRLVLNTEEELANERLMTLKIAEMKEAMRTLIFPPSMHFFQAKHLIERSQVFNILRMMPKGAALHLHDIGIVTMDWLVRNVTYRPHCHICFTPRGIMQFRFAHPTPRPSEKCSKWILLEDYRKRVQNVTEFDDSLLRNFTLVTQHPEVIYTNQNVVWSKFETIFFTISGLIHYAPVFRDYVFRSMQEFYEDNVLYMEIRAQLLPVYELSGEHHDEEWSVKTYQEVAQKFVETHPEFIGIKIIYNDHRSKDVAVIAESIRMAMGLRIKFPTVVAGFDLVGHEDTGHSLHDYKEALMIPAKDGVKLPYFFHAGETDWQGTSIDRNILDALMLNTTRIGHGFALSKHPAVRTYSWKKDIPIEVCPISNQVLKLVSDLRNHPVATLMATGHPMVISSDDPAMFGAKGLSYDFYEVFMGIGGMKADLRTLKQLAMNSIKYSTLLESEKNTFMEIWKKRWDKFIADVATK

SEQ ID NO: 721 - protein, 482 aa, synthetic construct
  REGION 1..482: note = human ADA2 R219Q/S262N/R217A, mature numbering
IDETRAHLLLKEKMMRLGGRLVLNTKEELANERLMTLKIAEMKEAMRTLIFPPSMHFFQAKHLIERSQVFNILRMMPKGAALHLHDIGIVTMDWLVRNVTYRPHCHICFTPRGIMQFRFAHPTPRPSEKCSKWILLEDYRKRVQNVTEFDDSLLRNFTLVTQHPEVIYTNQNVVWSKFETIFFTISGLIHYAPVFRDYVFRSMQEFYEDNVLYMEIAAQLLPVYELSGEHHDEEWSVKTYQEVAQKFVETHPEFIGIKIIYNDHRSKDVAVIAESIRMAMGLRIKFPTVVAGFDLVGHEDTGHSLHDYKEALMIPAKDGVKLPYFFHAGETDWQGTSIDRNILDALMLNTTRIGHGFALSKHPAVRTYSWKKDIPIEVCPISNQVLKLVSDLRNHPVATLMATGHPMVISSDDPAMFGAKGLSYDFYEVFMGIGGMKADLRTLKQLAMNSIKYSTLLESEKNTFMEIWKKRWDKFIADVATK

SEQ ID NO: 722 - protein, 482 aa, synthetic construct
  REGION 1..482: note = human ADA2 R219Q/S262N/R217D, mature numbering
IDETRAHLLLKEKMMRLGGRLVLNTKEELANERLMTLKIAEMKEAMRTLIFPPSMHFFQAKHLIERSQVFNILRMMPKGAALHLHDIGIVTMDWLVRNVTYRPHCHICFTPRGIMQFRFAHPTPRPSEKCSKWILLEDYRKRVQNVTEFDDSLLRNFTLVTQHPEVIYTNQNVVWSKFETIFFTISGLIHYAPVFRDYVFRSMQEFYEDNVLYMEIDAQLLPVYELSGEHHDEEWSVKTYQEVAQKFVETHPEFIGIKIIYNDHRSKDVAVIAESIRMAMGLRIKFPTVVAGFDLVGHEDTGHSLHDYKEALMIPAKDGVKLPYFFHAGETDWQGTSIDRNILDALMLNTTRIGHGFALSKHPAVRTYSWKKDIPIEVCPISNQVLKLVSDLRNHPVATLMATGHPMVISSDDPAMFGAKGLSYDFYEVFMGIGGMKADLRTLKQLAMNSIKYSTLLESEKNTFMEIWKKRWDKFIADVATK

SEQ ID NO: 723 - protein, 482 aa, synthetic construct
  REGION 1..482: note = human ADA2 R219Q/S262N/R217E, mature numbering
IDETRAHLLLKEKMMRLGGRLVLNTKEELANERLMTLKIAEMKEAMRTLIFPPSMHFFQAKHLIERSQVFNILRMMPKGAALHLHDIGIVTMDWLVRNVTYRPHCHICFTPRGIMQFRFAHPTPRPSEKCSKWILLEDYRKRVQNVTEFDDSLLRNFTLVTQHPEVIYTNQNVVWSKFETIFFTISGLIHYAPVFRDYVFRSMQEFYEDNVLYMEIEAQLLPVYELSGEHHDEEWSVKTYQEVAQKFVETHPEFIGIKIIYNDHRSKDVAVIAESIRMAMGLRIKFPTVVAGFDLVGHEDTGHSLHDYKEALMIPAKDGVKLPYFFHAGETDWQGTSIDRNILDALMLNTTRIGHGFALSKHPAVRTYSWKKDIPIEVCPISNQVLKLVSDLRNHPVATLMATGHPMVISSDDPAMFGAKGLSYDFYEVFMGIGGMKADLRTLKQLAMNSIKYSTLLESEKNTFMEIWKKRWDKFIADVATK

SEQ ID NO: 724 - protein, 482 aa, synthetic construct
  REGION 1..482: note = human ADA2 R219Q/S262N/K258A, mature numbering
IDETRAHLLLKEKMMRLGGRLVLNTKEELANERLMTLKIAEMKEAMRTLIFPPSMHFFQAKHLIERSQVFNILRMMPKGAALHLHDIGIVTMDWLVRNVTYRPHCHICFTPRGIMQFRFAHPTPRPSEKCSKWILLEDYRKRVQNVTEFDDSLLRNFTLVTQHPEVIYTNQNVVWSKFETIFFTISGLIHYAPVFRDYVFRSMQEFYEDNVLYMEIRAQLLPVYELSGEHHDEEWSVKTYQEVAQKFVETHPEFIGIAIIYNDHRSKDVAVIAESIRMAMGLRIKFPTVVAGFDLVGHEDTGHSLHDYKEALMIPAKDGVKLPYFFHAGETDWQGTSIDRNILDALMLNTTRIGHGFALSKHPAVRTYSWKKDIPIEVCPISNQVLKLVSDLRNHPVATLMATGHPMVISSDDPAMFGAKGLSYDFYEVFMGIGGMKADLRTLKQLAMNSIKYSTLLESEKNTFMEIWKKRWDKFIADVATK

SEQ ID NO: 725 - protein, 482 aa, synthetic construct
  REGION 1..482: note = human ADA2 R219Q/S262N/K258D, mature numbering
IDETRAHLLLKEKMMRLGGRLVLNTKEELANERLMTLKIAEMKEAMRTLIFPPSMHFFQAKHLIERSQVFNILRMMPKGAALHLHDIGIVTMDWLVRNVTYRPHCHICFTPRGIMQFRFAHPTPRPSEKCSKWILLEDYRKRVQNVTEFDDSLLRNFTLVTQHPEVIYTNQNVVWSKFETIFFTISGLIHYAPVFRDYVFRSMQEFYEDNVLYMEIRAQLLPVYELSGEHHDEEWSVKTYQEVAQKFVETHPEFIGIDIIYNDHRSKDVAVIAESIRMAMGLRIKFPTVVAGFDLVGHEDTGHSLHDYKEALMIPAKDGVKLPYFFHAGETDWQGTSIDRNILDALMLNTTRIGHGFALSKHPAVRTYSWKKDIPIEVCPISNQVLKLVSDLRNHPVATLMATGHPMVISSDDPAMFGAKGLSYDFYEVFMGIGGMKADLRTLKQLAMNSIKYSTLLESEKNTFMEIWKKRWDKFIADVATK

SEQ ID NO: 726 - protein, 482 aa, synthetic construct
  REGION 1..482: note = human ADA2 R219Q/S262N/K258E, mature numbering
IDETRAHLLLKEKMMRLGGRLVLNTKEELANERLMTLKIAEMKEAMRTLIFPPSMHFFQAKHLIERSQVFNILRMMPKGAALHLHDIGIVTMDWLVRNVTYRPHCHICFTPRGIMQFRFAHPTPRPSEKCSKWILLEDYRKRVQNVTEFDDSLLRNFTLVTQHPEVIYTNQNVVWSKFETIFFTISGLIHYAPVFRDYVFRSMQEFYEDNVLYMEIRAQLLPVYELSGEHHDEEWSVKTYQEVAQKFVETHPEFIGIEIIYNDHRSKDVAVIAESIRMAMGLRIKFPTVVAGFDLVGHEDTGHSLHDYKEALMIPAKDGVKLPYFFHAGETDWQGTSIDRNILDALMLNTTRIGHGFALSKHPAVRTYSWKKDIPIEVCPISNQVLKLVSDLRNHPVATLMATGHPMVISSDDPAMFGAKGLSYDFYEVFMGIGGMKADLRTLKQLAMNSIKYSTLLESEKNTFMEIWKKRWDKFIADVATK

SEQ ID NO: 727 - protein, 482 aa, synthetic construct
  REGION 1..482: note = human ADA2 R219Q/S262N/R277A, mature numbering
IDETRAHLLLKEKMMRLGGRLVLNTKEELANERLMTLKIAEMKEAMRTLIFPPSMHFFQAKHLIERSQVFNILRMMPKGAALHLHDIGIVTMDWLVRNVTYRPHCHICFTPRGIMQFRFAHPTPRPSEKCSKWILLEDYRKRVQNVTEFDDSLLRNFTLVTQHPEVIYTNQNVVWSKFETIFFTISGLIHYAPVFRDYVFRSMQEFYEDNVLYMEIRAQLLPVYELSGEHHDEEWSVKTYQEVAQKFVETHPEFIGIKIIYNDHRSKDVAVIAESIAMAMGLRIKFPTVVAGFDLVGHEDTGHSLHDYKEALMIPAKDGVKLPYFFHAGETDWQGTSIDRNILDALMLNTTRIGHGFALSKHPAVRTYSWKKDIPIEVCPISNQVLKLVSDLRNHPVATLMATGHPMVISSDDPAMFGAKGLSYDFYEVFMGIGGMKADLRTLKQLAMNSIKYSTLLESEKNTFMEIWKKRWDKFIADVATK

SEQ ID NO: 728 - protein, 482 aa, synthetic construct
  REGION 1..482: note = human ADA2 R219Q/S262N/R277D, mature numbering
IDETRAHLLLKEKMMRLGGRLVLNTKEELANERLMTLKIAEMKEAMRTLIFPPSMHFFQAKHLIERSQVFNILRMMPKGAALHLHDIGIVTMDWLVRNVTYRPHCHICFTPRGIMQFRFAHPTPRPSEKCSKWILLEDYRKRVQNVTEFDDSLLRNFTLVTQHPEVIYTNQNVVWSKFETIFFTISGLIHYAPVFRDYVFRSMQEFYEDNVLYMEIRAQLLPVYELSGEHHDEEWSVKTYQEVAQKFVETHPEFIGIKIIYNDHRSKDVAVIAESIDMAMGLRIKFPTVVAGFDLVGHEDTGHSLHDYKEALMIPAKDGVKLPYFFHAGETDWQGTSIDRNILDALMLNTTRIGHGFALSKHPAVRTYSWKKDIPIEVCPISNQVLKLVSDLRNHPVATLMATGHPMVISSDDPAMFGAKGLSYDFYEVFMGIGGMKADLRTLKQLAMNSIKYSTLLESEKNTFMEIWKKRWDKFIADVATK

SEQ ID NO: 729 - protein, 482 aa, synthetic construct
  REGION 1..482: note = human ADA2 R219Q/S262N/R277E, mature numbering
IDETRAHLLLKEKMMRLGGRLVLNTKEELANERLMTLKIAEMKEAMRTLIFPPSMHFFQAKHLIERSQVFNILRMMPKGAALHLHDIGIVTMDWLVRNVTYRPHCHICFTPRGIMQFRFAHPTPRPSEKCSKWILLEDYRKRVQNVTEFDDSLLRNFTLVTQHPEVIYTNQNVVWSKFETIFFTISGLIHYAPVFRDYVFRSMQEFYEDNVLYMEIRAQLLPVYELSGEHHDEEWSVKTYQEVAQKFVETHPEFIGIKIIYNDHRSKDVAVIAESIEMAMGLRIKFPTVVAGFDLVGHEDTGHSLHDYKEALMIPAKDGVKLPYFFHAGETDWQGTSIDRNILDALMLNTTRIGHGFALSKHPAVRTYSWKKDIPIEVCPISNQVLKLVSDLRNHPVATLMATGHPMVISSDDPAMFGAKGLSYDFYEVFMGIGGMKADLRTLKQLAMNSIKYSTLLESEKNTFMEIWKKRWDKFIADVATK

SEQ ID NO: 730 - protein, 482 aa, synthetic construct
  REGION 1..482: note = human ADA2 R219Q/S262N/R283A, mature numbering
IDETRAHLLLKEKMMRLGGRLVLNTKEELANERLMTLKIAEMKEAMRTLIFPPSMHFFQAKHLIERSQVFNILRMMPKGAALHLHDIGIVTMDWLVRNVTYRPHCHICFTPRGIMQFRFAHPTPRPSEKCSKWILLEDYRKRVQNVTEFDDSLLRNFTLVTQHPEVIYTNQNVVWSKFETIFFTISGLIHYAPVFRDYVFRSMQEFYEDNVLYMEIRAQLLPVYELSGEHHDEEWSVKTYQEVAQKFVETHPEFIGIKIIYNDHRSKDVAVIAESIRMAMGLAIKFPTVVAGFDLVGHEDTGHSLHDYKEALMIPAKDGVKLPYFFHAGETDWQGTSIDRNILDALMLNTTRIGHGFALSKHPAVRTYSWKKDIPIEVCPISNQVLKLVSDLRNHPVATLMATGHPMVISSDDPAMFGAKGLSYDFYEVFMGIGGMKADLRTLKQLAMNSIKYSTLLESEKNTFMEIWKKRWDKFIADVATK

SEQ ID NO: 731 - protein, 482 aa, synthetic construct
  REGION 1..482: note = human ADA2 R219Q/S262N/R283D, mature numbering
IDETRAHLLLKEKMMRLGGRLVLNTKEELANERLMTLKIAEMKEAMRTLIFPPSMHFFQAKHLIERSQVFNILRMMPKGAALHLHDIGIVTMDWLVRNVTYRPHCHICFTPRGIMQFRFAHPTPRPSEKCSKWILLEDYRKRVQNVTEFDDSLLRNFTLVTQHPEVIYTNQNVVWSKFETIFFTISGLIHYAPVFRDYVFRSMQEFYEDNVLYMEIRAQLLPVYELSGEHHDEEWSVKTYQEVAQKFVETHPEFIGIKIIYNDHRSKDVAVIAESIRMAMGLDIKFPTVVAGFDLVGHEDTGHSLHDYKEALMIPAKDGVKLPYFFHAGETDWQGTSIDRNILDALMLNTTRIGHGFALSKHPAVRTYSWKKDIPIEVCPISNQVLKLVSDLRNHPVATLMATGHPMVISSDDPAMFGAKGLSYDFYEVFMGIGGMKADLRTLKQLAMNSIKYSTLLESEKNTFMEIWKKRWDKFIADVATK

SEQ ID NO: 732 - protein, 482 aa, synthetic construct
  REGION 1..482: note = human ADA2 R219Q/S262N/R283E, mature numbering
IDETRAHLLLKEKMMRLGGRLVLNTKEELANERLMTLKIAEMKEAMRTLIFPPSMHFFQAKHLIERSQVFNILRMMPKGAALHLHDIGIVTMDWLVRNVTYRPHCHICFTPRGIMQFRFAHPTPRPSEKCSKWILLEDYRKRVQNVTEFDDSLLRNFTLVTQHPEVIYTNQNVVWSKFETIFFTISGLIHYAPVFRDYVFRSMQEFYEDNVLYMEIRAQLLPVYELSGEHHDEEWSVKTYQEVAQKFVETHPEFIGIKIIYNDHRSKDVAVIAESIRMAMGLEIKFPTVVAGFDLVGHEDTGHSLHDYKEALMIPAKDGVKLPYFFHAGETDWQGTSIDRNILDALMLNTTRIGHGFALSKHPAVRTYSWKKDIPIEVCPISNQVLKLVSDLRNHPVATLMATGHPMVISSDDPAMFGAKGLSYDFYEVFMGIGGMKADLRTLKQLAMNSIKYSTLLESEKNTFMEIWKKRWDKFIADVATK

SEQ ID NO: 733 - protein, 482 aa, synthetic construct
  REGION 1..482: note = human ADA2 R219Q/S262N/K309A, mature numbering
IDETRAHLLLKEKMMRLGGRLVLNTKEELANERLMTLKIAEMKEAMRTLIFPPSMHFFQAKHLIERSQVFNILRMMPKGAALHLHDIGIVTMDWLVRNVTYRPHCHICFTPRGIMQFRFAHPTPRPSEKCSKWILLEDYRKRVQNVTEFDDSLLRNFTLVTQHPEVIYTNQNVVWSKFETIFFTISGLIHYAPVFRDYVFRSMQEFYEDNVLYMEIRAQLLPVYELSGEHHDEEWSVKTYQEVAQKFVETHPEFIGIKIIYNDHRSKDVAVIAESIRMAMGLRIKFPTVVAGFDLVGHEDTGHSLHDYAEALMIPAKDGVKLPYFFHAGETDWQGTSIDRNILDALMLNTTRIGHGFALSKHPAVRTYSWKKDIPIEVCPISNQVLKLVSDLRNHPVATLMATGHPMVISSDDPAMFGAKGLSYDFYEVFMGIGGMKADLRTLKQLAMNSIKYSTLLESEKNTFMEIWKKRWDKFIADVATK

SEQ ID NO: 734 - protein, 482 aa, synthetic construct
  REGION 1..482: note = human ADA2 R219Q/S262N/K309D, mature numbering
IDETRAHLLLKEKMMRLGGRLVLNTKEELANERLMTLKIAEMKEAMRTLIFPPSMHFFQAKHLIERSQVFNILRMMPKGAALHLHDIGIVTMDWLVRNVTYRPHCHICFTPRGIMQFRFAHPTPRPSEKCSKWILLEDYRKRVQNVTEFDDSLLRNFTLVTQHPEVIYTNQNVVWSKFETIFFTISGLIHYAPVFRDYVFRSMQEFYEDNVLYMEIRAQLLPVYELSGEHHDEEWSVKTYQEVAQKFVETHPEFIGIKIIYNDHRSKDVAVIAESIRMAMGLRIKFPTVVAGFDLVGHEDTGHSLHDYDEALMIPAKDGVKLPYFFHAGETDWQGTSIDRNILDALMLNTTRIGHGFALSKHPAVRTYSWKKDIPIEVCPISNQVLKLVSDLRNHPVATLMATGHPMVISSDDPAMFGAKGLSYDFYEVFMGIGGMKADLRTLKQLAMNSIKYSTLLESEKNTFMEIWKKRWDKFIADVATK

SEQ ID NO: 735 - protein, 482 aa, synthetic construct
  REGION 1..482: note = human ADA2 R219Q/S262N/K309E, mature numbering
IDETRAHLLLKEKMMRLGGRLVLNTKEELANERLMTLKIAEMKEAMRTLIFPPSMHFFQAKHLIERSQVFNILRMMPKGAALHLHDIGIVTMDWLVRNVTYRPHCHICFTPRGIMQFRFAHPTPRPSEKCSKWILLEDYRKRVQNVTEFDDSLLRNFTLVTQHPEVIYTNQNVVWSKFETIFFTISGLIHYAPVFRDYVFRSMQEFYEDNVLYMEIRAQLLPVYELSGEHHDEEWSVKTYQEVAQKFVETHPEFIGIKIIYNDHRSKDVAVIAESIRMAMGLRIKFPTVVAGFDLVGHEDTGHSLHDYEEALMIPAKDGVKLPYFFHAGETDWQGTSIDRNILDALMLNTTRIGHGFALSKHPAVRTYSWKKDIPIEVCPISNQVLKLVSDLRNHPVATLMATGHPMVISSDDPAMFGAKGLSYDFYEVFMGIGGMKADLRTLKQLAMNSIKYSTLLESEKNTFMEIWKKRWDKFIADVATK

SEQ ID NO: 736 - protein, 482 aa, synthetic construct
  REGION 1..482: note = human ADA2 R219Q/S262N/K317A, mature numbering
IDETRAHLLLKEKMMRLGGRLVLNTKEELANERLMTLKIAEMKEAMRTLIFPPSMHFFQAKHLIERSQVFNILRMMPKGAALHLHDIGIVTMDWLVRNVTYRPHCHICFTPRGIMQFRFAHPTPRPSEKCSKWILLEDYRKRVQNVTEFDDSLLRNFTLVTQHPEVIYTNQNVVWSKFETIFFTISGLIHYAPVFRDYVFRSMQEFYEDNVLYMEIRAQLLPVYELSGEHHDEEWSVKTYQEVAQKFVETHPEFIGIKIIYNDHRSKDVAVIAESIRMAMGLRIKFPTVVAGFDLVGHEDTGHSLHDYKEALMIPAADGVKLPYFFHAGETDWQGTSIDRNILDALMLNTTRIGHGFALSKHPAVRTYSWKKDIPIEVCPISNQVLKLVSDLRNHPVATLMATGHPMVISSDDPAMFGAKGLSYDFYEVFMGIGGMKADLRTLKQLAMNSIKYSTLLESEKNTFMEIWKKRWDKFIADVATK

SEQ ID NO: 737 - protein, 482 aa, synthetic construct
  REGION 1..482: note = human ADA2 R219Q/S262N/K317D, mature numbering
IDETRAHLLLKEKMMRLGGRLVLNTKEELANERLMTLKIAEMKEAMRTLIFPPSMHFFQAKHLIERSQVFNILRMMPKGAALHLHDIGIVTMDWLVRNVTYRPHCHICFTPRGIMQFRFAHPTPRPSEKCSKWILLEDYRKRVQNVTEFDDSLLRNFTLVTQHPEVIYTNQNVVWSKFETIFFTISGLIHYAPVFRDYVFRSMQEFYEDNVLYMEIRAQLLPVYELSGEHHDEEWSVKTYQEVAQKFVETHPEFIGIKIIYNDHRSKDVAVIAESIRMAMGLRIKFPTVVAGFDLVGHEDTGHSLHDYKEALMIPADDGVKLPYFFHAGETDWQGTSIDRNILDALMLNTTRIGHGFALSKHPAVRTYSWKKDIPIEVCPISNQVLKLVSDLRNHPVATLMATGHPMVISSDDPAMFGAKGLSYDFYEVFMGIGGMKADLRTLKQLAMNSIKYSTLLESEKNTFMEIWKKRWDKFIADVATK

SEQ ID NO: 738 - protein, 482 aa, synthetic construct
  REGION 1..482: note = human ADA2 R219Q/S262N/K317E, mature numbering
IDETRAHLLLKEKMMRLGGRLVLNTKEELANERLMTLKIAEMKEAMRTLIFPPSMHFFQAKHLIERSQVFNILRMMPKGAALHLHDIGIVTMDWLVRNVTYRPHCHICFTPRGIMQFRFAHPTPRPSEKCSKWILLEDYRKRVQNVTEFDDSLLRNFTLVTQHPEVIYTNQNVVWSKFETIFFTISGLIHYAPVFRDYVFRSMQEFYEDNVLYMEIRAQLLPVYELSGEHHDEEWSVKTYQEVAQKFVETHPEFIGIKIIYNDHRSKDVAVIAESIRMAMGLRIKFPTVVAGFDLVGHEDTGHSLHDYKEALMIPAEDGVKLPYFFHAGETDWQGTSIDRNILDALMLNTTRIGHGFALSKHPAVRTYSWKKDIPIEVCPISNQVLKLVSDLRNHPVATLMATGHPMVISSDDPAMFGAKGLSYDFYEVFMGIGGMKADLRTLKQLAMNSIKYSTLLESEKNTFMEIWKKRWDKFIADVATK

SEQ ID NO: 739 - protein, 482 aa, synthetic construct
  REGION 1..482: note = human ADA2 R219Q/S262N/K321A, mature numbering
IDETRAHLLLKEKMMRLGGRLVLNTKEELANERLMTLKIAEMKEAMRTLIFPPSMHFFQAKHLIERSQVFNILRMMPKGAALHLHDIGIVTMDWLVRNVTYRPHCHICFTPRGIMQFRFAHPTPRPSEKCSKWILLEDYRKRVQNVTEFDDSLLRNFTLVTQHPEVIYTNQNVVWSKFETIFFTISGLIHYAPVFRDYVFRSMQEFYEDNVLYMEIRAQLLPVYELSGEHHDEEWSVKTYQEVAQKFVETHPEFIGIKIIYNDHRSKDVAVIAESIRMAMGLRIKFPTVVAGFDLVGHEDTGHSLHDYKEALMIPAKDGVALPYFFHAGETDWQGTSIDRNILDALMLNTTRIGHGFALSKHPAVRTYSWKKDIPIEVCPISNQVLKLVSDLRNHPVATLMATGHPMVISSDDPAMFGAKGLSYDFYEVFMGIGGMKADLRTLKQLAMNSIKYSTLLESEKNTFMEIWKKRWDKFIADVATK

SEQ ID NO: 740 - protein, 482 aa, synthetic construct
  REGION 1..482: note = human ADA2 R219Q/S262N/K321D, mature numbering
IDETRAHLLLKEKMMRLGGRLVLNTKEELANERLMTLKIAEMKEAMRTLIFPPSMHFFQAKHLIERSQVFNILRMMPKGAALHLHDIGIVTMDWLVRNVTYRPHCHICFTPRGIMQFRFAHPTPRPSEKCSKWILLEDYRKRVQNVTEFDDSLLRNFTLVTQHPEVIYTNQNVVWSKFETIFFTISGLIHYAPVFRDYVFRSMQEFYEDNVLYMEIRAQLLPVYELSGEHHDEEWSVKTYQEVAQKFVETHPEFIGIKIIYNDHRSKDVAVIAESIRMAMGLRIKFPTVVAGFDLVGHEDTGHSLHDYKEALMIPAKDGVDLPYFFHAGETDWQGTSIDRNILDALMLNTTRIGHGFALSKHPAVRTYSWKKDIPIEVCPISNQVLKLVSDLRNHPVATLMATGHPMVISSDDPAMFGAKGLSYDFYEVFMGIGGMKADLRTLKQLAMNSIKYSTLLESEKNTFMEIWKKRWDKFIADVATK

SEQ ID NO: 741 - protein, 482 aa, synthetic construct
  REGION 1..482: note = human ADA2 R219Q/S262N/K321E, mature numbering
IDETRAHLLLKEKMMRLGGRLVLNTKEELANERLMTLKIAEMKEAMRTLIFPPSMHFFQAKHLIERSQVFNILRMMPKGAALHLHDIGIVTMDWLVRNVTYRPHCHICFTPRGIMQFRFAHPTPRPSEKCSKWILLEDYRKRVQNVTEFDDSLLRNFTLVTQHPEVIYTNQNVVWSKFETIFFTISGLIHYAPVFRDYVFRSMQEFYEDNVLYMEIRAQLLPVYELSGEHHDEEWSVKTYQEVAQKFVETHPEFIGIKIIYNDHRSKDVAVIAESIRMAMGLRIKFPTVVAGFDLVGHEDTGHSLHDYKEALMIPAKDGVELPYFFHAGETDWQGTSIDRNILDALMLNTTRIGHGFALSKHPAVRTYSWKKDIPIEVCPISNQVLKLVSDLRNHPVATLMATGHPMVISSDDPAMFGAKGLSYDFYEVFMGIGGMKADLRTLKQLAMNSIKYSTLLESEKNTFMEIWKKRWDKFIADVATK

SEQ ID NO: 742 - protein, 482 aa, synthetic construct
  REGION 1..482: note = human ADA2 R219Q/S262N/R352A, mature numbering
IDETRAHLLLKEKMMRLGGRLVLNTKEELANERLMTLKIAEMKEAMRTLIFPPSMHFFQAKHLIERSQVFNILRMMPKGAALHLHDIGIVTMDWLVRNVTYRPHCHICFTPRGIMQFRFAHPTPRPSEKCSKWILLEDYRKRVQNVTEFDDSLLRNFTLVTQHPEVIYTNQNVVWSKFETIFFTISGLIHYAPVFRDYVFRSMQEFYEDNVLYMEIRAQLLPVYELSGEHHDEEWSVKTYQEVAQKFVETHPEFIGIKIIYNDHRSKDVAVIAESIRMAMGLRIKFPTVVAGFDLVGHEDTGHSLHDYKEALMIPAKDGVKLPYFFHAGETDWQGTSIDRNILDALMLNTTAIGHGFALSKHPAVRTYSWKKDIPIEVCPISNQVLKLVSDLRNHPVATLMATGHPMVISSDDPAMFGAKGLSYDFYEVFMGIGGMKADLRTLKQLAMNSIKYSTLLESEKNTFMEIWKKRWDKFIADVATK

SEQ ID NO: 743 - protein, 482 aa, synthetic construct
  REGION 1..482: note = human ADA2 R219Q/S262N/R352D, mature numbering
IDETRAHLLLKEKMMRLGGRLVLNTKEELANERLMTLKIAEMKEAMRTLIFPPSMHFFQAKHLIERSQVFNILRMMPKGAALHLHDIGIVTMDWLVRNVTYRPHCHICFTPRGIMQFRFAHPTPRPSEKCSKWILLEDYRKRVQNVTEFDDSLLRNFTLVTQHPEVIYTNQNVVWSKFETIFFTISGLIHYAPVFRDYVFRSMQEFYEDNVLYMEIRAQLLPVYELSGEHHDEEWSVKTYQEVAQKFVETHPEFIGIKIIYNDHRSKDVAVIAESIRMAMGLRIKFPTVVAGFDLVGHEDTGHSLHDYKEALMIPAKDGVKLPYFFHAGETDWQGTSIDRNILDALMLNTTDIGHGFALSKHPAVRTYSWKKDIPIEVCPISNQVLKLVSDLRNHPVATLMATGHPMVISSDDPAMFGAKGLSYDFYEVFMGIGGMKADLRTLKQLAMNSIKYSTLLESEKNTFMEIWKKRWDKFIADVATK

SEQ ID NO: 744 - protein, 482 aa, synthetic construct
  REGION 1..482: note = human ADA2 R219Q/S262N/R352E, mature numbering
IDETRAHLLLKEKMMRLGGRLVLNTKEELANERLMTLKIAEMKEAMRTLIFPPSMHFFQAKHLIERSQVFNILRMMPKGAALHLHDIGIVTMDWLVRNVTYRPHCHICFTPRGIMQFRFAHPTPRPSEKCSKWILLEDYRKRVQNVTEFDDSLLRNFTLVTQHPEVIYTNQNVVWSKFETIFFTISGLIHYAPVFRDYVFRSMQEFYEDNVLYMEIRAQLLPVYELSGEHHDEEWSVKTYQEVAQKFVETHPEFIGIKIIYNDHRSKDVAVIAESIRMAMGLRIKFPTVVAGFDLVGHEDTGHSLHDYKEALMIPAKDGVKLPYFFHAGETDWQGTSIDRNILDALMLNTTEIGHGFALSKHPAVRTYSWKKDIPIEVCPISNQVLKLVSDLRNHPVATLMATGHPMVISSDDPAMFGAKGLSYDFYEVFMGIGGMKADLRTLKQLAMNSIKYSTLLESEKNTFMEIWKKRWDKFIADVATK

SEQ ID NO: 745 - protein, 482 aa, synthetic construct
  REGION 1..482: note = human ADA2 R219Q/S262N/R441A, mature numbering
IDETRAHLLLKEKMMRLGGRLVLNTKEELANERLMTLKIAEMKEAMRTLIFPPSMHFFQAKHLIERSQVFNILRMMPKGAALHLHDIGIVTMDWLVRNVTYRPHCHICFTPRGIMQFRFAHPTPRPSEKCSKWILLEDYRKRVQNVTEFDDSLLRNFTLVTQHPEVIYTNQNVVWSKFETIFFTISGLIHYAPVFRDYVFRSMQEFYEDNVLYMEIRAQLLPVYELSGEHHDEEWSVKTYQEVAQKFVETHPEFIGIKIIYNDHRSKDVAVIAESIRMAMGLRIKFPTVVAGFDLVGHEDTGHSLHDYKEALMIPAKDGVKLPYFFHAGETDWQGTSIDRNILDALMLNTTRIGHGFALSKHPAVRTYSWKKDIPIEVCPISNQVLKLVSDLRNHPVATLMATGHPMVISSDDPAMFGAKGLSYDFYEVFMGIGGMKADLATLKQLAMNSIKYSTLLESEKNTFMEIWKKRWDKFIADVATK

SEQ ID NO: 746 - protein, 482 aa, synthetic construct
  REGION 1..482: note = human ADA2 R219Q/S262N/R441D, mature numbering
IDETRAHLLLKEKMMRLGGRLVLNTKEELANERLMTLKIAEMKEAMRTLIFPPSMHFFQAKHLIERSQVFNILRMMPKGAALHLHDIGIVTMDWLVRNVTYRPHCHICFTPRGIMQFRFAHPTPRPSEKCSKWILLEDYRKRVQNVTEFDDSLLRNFTLVTQHPEVIYTNQNVVWSKFETIFFTISGLIHYAPVFRDYVFRSMQEFYEDNVLYMEIRAQLLPVYELSGEHHDEEWSVKTYQEVAQKFVETHPEFIGIKIIYNDHRSKDVAVIAESIRMAMGLRIKFPTVVAGFDLVGHEDTGHSLHDYKEALMIPAKDGVKLPYFFHAGETDWQGTSIDRNILDALMLNTTRIGHGFALSKHPAVRTYSWKKDIPIEVCPISNQVLKLVSDLRNHPVATLMATGHPMVISSDDPAMFGAKGLSYDFYEVFMGIGGMKADLDTLKQLAMNSIKYSTLLESEKNTFMEIWKKRWDKFIADVATK

SEQ ID NO: 747 - protein, 482 aa, synthetic construct
  REGION 1..482: note = human ADA2 R219Q/S262N/R441E, mature numbering
IDETRAHLLLKEKMMRLGGRLVLNTKEELANERLMTLKIAEMKEAMRTLIFPPSMHFFQAKHLIERSQVFNILRMMPKGAALHLHDIGIVTMDWLVRNVTYRPHCHICFTPRGIMQFRFAHPTPRPSEKCSKWILLEDYRKRVQNVTEFDDSLLRNFTLVTQHPEVIYTNQNVVWSKFETIFFTISGLIHYAPVFRDYVFRSMQEFYEDNVLYMEIRAQLLPVYELSGEHHDEEWSVKTYQEVAQKFVETHPEFIGIKIIYNDHRSKDVAVIAESIRMAMGLRIKFPTVVAGFDLVGHEDTGHSLHDYKEALMIPAKDGVKLPYFFHAGETDWQGTSIDRNILDALMLNTTRIGHGFALSKHPAVRTYSWKKDIPIEVCPISNQVLKLVSDLRNHPVATLMATGHPMVISSDDPAMFGAKGLSYDFYEVFMGIGGMKADLETLKQLAMNSIKYSTLLESEKNTFMEIWKKRWDKFIADVATK

SEQ ID NO: 748 - protein, 482 aa, synthetic construct
  REGION 1..482: note = human ADA2 R219Q/S262N/K444A, mature numbering
IDETRAHLLLKEKMMRLGGRLVLNTKEELANERLMTLKIAEMKEAMRTLIFPPSMHFFQAKHLIERSQVFNILRMMPKGAALHLHDIGIVTMDWLVRNVTYRPHCHICFTPRGIMQFRFAHPTPRPSEKCSKWILLEDYRKRVQNVTEFDDSLLRNFTLVTQHPEVIYTNQNVVWSKFETIFFTISGLIHYAPVFRDYVFRSMQEFYEDNVLYMEIRAQLLPVYELSGEHHDEEWSVKTYQEVAQKFVETHPEFIGIKIIYNDHRSKDVAVIAESIRMAMGLRIKFPTVVAGFDLVGHEDTGHSLHDYKEALMIPAKDGVKLPYFFHAGETDWQGTSIDRNILDALMLNTTRIGHGFALSKHPAVRTYSWKKDIPIEVCPISNQVLKLVSDLRNHPVATLMATGHPMVISSDDPAMFGAKGLSYDFYEVFMGIGGMKADLRTLAQLAMNSIKYSTLLESEKNTFMEIWKKRWDKFIADVATK

SEQ ID NO: 749 - protein, 482 aa, synthetic construct
  REGION 1..482: note = human ADA2 R219Q/S262N/K444D, mature numbering
IDETRAHLLLKEKMMRLGGRLVLNTKEELANERLMTLKIAEMKEAMRTLIFPPSMHFFQAKHLIERSQVFNILRMMPKGAALHLHDIGIVTMDWLVRNVTYRPHCHICFTPRGIMQFRFAHPTPRPSEKCSKWILLEDYRKRVQNVTEFDDSLLRNFTLVTQHPEVIYTNQNVVWSKFETIFFTISGLIHYAPVFRDYVFRSMQEFYEDNVLYMEIRAQLLPVYELSGEHHDEEWSVKTYQEVAQKFVETHPEFIGIKIIYNDHRSKDVAVIAESIRMAMGLRIKFPTVVAGFDLVGHEDTGHSLHDYKEALMIPAKDGVKLPYFFHAGETDWQGTSIDRNILDALMLNTTRIGHGFALSKHPAVRTYSWKKDIPIEVCPISNQVLKLVSDLRNHPVATLMATGHPMVISSDDPAMFGAKGLSYDFYEVFMGIGGMKADLRTLDQLAMNSIKYSTLLESEKNTFMEIWKKRWDKFIADVATK

SEQ ID NO: 750 - protein, 482 aa, synthetic construct
  REGION 1..482: note = human ADA2 R219Q/S262N/K444E, mature numbering
IDETRAHLLLKEKMMRLGGRLVLNTKEELANERLMTLKIAEMKEAMRTLIFPPSMHFFQAKHLIERSQVFNILRMMPKGAALHLHDIGIVTMDWLVRNVTYRPHCHICFTPRGIMQFRFAHPTPRPSEKCSKWILLEDYRKRVQNVTEFDDSLLRNFTLVTQHPEVIYTNQNVVWSKFETIFFTISGLIHYAPVFRDYVFRSMQEFYEDNVLYMEIRAQLLPVYELSGEHHDEEWSVKTYQEVAQKFVETHPEFIGIKIIYNDHRSKDVAVIAESIRMAMGLRIKFPTVVAGFDLVGHEDTGHSLHDYKEALMIPAKDGVKLPYFFHAGETDWQGTSIDRNILDALMLNTTRIGHGFALSKHPAVRTYSWKKDIPIEVCPISNQVLKLVSDLRNHPVATLMATGHPMVISSDDPAMFGAKGLSYDFYEVFMGIGGMKADLRTLEQLAMNSIKYSTLLESEKNTFMEIWKKRWDKFIADVATK

SEQ ID NO: 751 - protein, 482 aa, synthetic construct
  REGION 1..482: note = human ADA2 R219Q/S262N/K461A, mature numbering
IDETRAHLLLKEKMMRLGGRLVLNTKEELANERLMTLKIAEMKEAMRTLIFPPSMHFFQAKHLIERSQVFNILRMMPKGAALHLHDIGIVTMDWLVRNVTYRPHCHICFTPRGIMQFRFAHPTPRPSEKCSKWILLEDYRKRVQNVTEFDDSLLRNFTLVTQHPEVIYTNQNVVWSKFETIFFTISGLIHYAPVFRDYVFRSMQEFYEDNVLYMEIRAQLLPVYELSGEHHDEEWSVKTYQEVAQKFVETHPEFIGIKIIYNDHRSKDVAVIAESIRMAMGLRIKFPTVVAGFDLVGHEDTGHSLHDYKEALMIPAKDGVKLPYFFHAGETDWQGTSIDRNILDALMLNTTRIGHGFALSKHPAVRTYSWKKDIPIEVCPISNQVLKLVSDLRNHPVATLMATGHPMVISSDDPAMFGAKGLSYDFYEVFMGIGGMKADLRTLKQLAMNSIKYSTLLESEANTFMEIWKKRWDKFIADVATK

SEQ ID NO: 752 - protein, 482 aa, synthetic construct
  REGION 1..482: note = human ADA2 R219Q/S262N/K461D, mature numbering
IDETRAHLLLKEKMMRLGGRLVLNTKEELANERLMTLKIAEMKEAMRTLIFPPSMHFFQAKHLIERSQVFNILRMMPKGAALHLHDIGIVTMDWLVRNVTYRPHCHICFTPRGIMQFRFAHPTPRPSEKCSKWILLEDYRKRVQNVTEFDDSLLRNFTLVTQHPEVIYTNQNVVWSKFETIFFTISGLIHYAPVFRDYVFRSMQEFYEDNVLYMEIRAQLLPVYELSGEHHDEEWSVKTYQEVAQKFVETHPEFIGIKIIYNDHRSKDVAVIAESIRMAMGLRIKFPTVVAGFDLVGHEDTGHSLHDYKEALMIPAKDGVKLPYFFHAGETDWQGTSIDRNILDALMLNTTRIGHGFALSKHPAVRTYSWKKDIPIEVCPISNQVLKLVSDLRNHPVATLMATGHPMVISSDDPAMFGAKGLSYDFYEVFMGIGGMKADLRTLKQLAMNSIKYSTLLESEDNTFMEIWKKRWDKFIADVATK

SEQ ID NO: 753 - protein, 482 aa, synthetic construct
  REGION 1..482: note = human ADA2 R219Q/S262N/K461E, mature numbering
IDETRAHLLLKEKMMRLGGRLVLNTKEELANERLMTLKIAEMKEAMRTLIFPPSMHFFQAKHLIERSQVFNILRMMPKGAALHLHDIGIVTMDWLVRNVTYRPHCHICFTPRGIMQFRFAHPTPRPSEKCSKWILLEDYRKRVQNVTEFDDSLLRNFTLVTQHPEVIYTNQNVVWSKFETIFFTISGLIHYAPVFRDYVFRSMQEFYEDNVLYMEIRAQLLPVYELSGEHHDEEWSVKTYQEVAQKFVETHPEFIGIKIIYNDHRSKDVAVIAESIRMAMGLRIKFPTVVAGFDLVGHEDTGHSLHDYKEALMIPAKDGVKLPYFFHAGETDWQGTSIDRNILDALMLNTTRIGHGFALSKHPAVRTYSWKKDIPIEVCPISNQVLKLVSDLRNHPVATLMATGHPMVISSDDPAMFGAKGLSYDFYEVFMGIGGMKADLRTLKQLAMNSIKYSTLLESEENTFMEIWKKRWDKFIADVATK

SEQ ID NO: 754 - protein, 482 aa, synthetic construct
  REGION 1..482: note = human ADA2 R219Q/S262N/K469A, mature numbering
IDETRAHLLLKEKMMRLGGRLVLNTKEELANERLMTLKIAEMKEAMRTLIFPPSMHFFQAKHLIERSQVFNILRMMPKGAALHLHDIGIVTMDWLVRNVTYRPHCHICFTPRGIMQFRFAHPTPRPSEKCSKWILLEDYRKRVQNVTEFDDSLLRNFTLVTQHPEVIYTNQNVVWSKFETIFFTISGLIHYAPVFRDYVFRSMQEFYEDNVLYMEIRAQLLPVYELSGEHHDEEWSVKTYQEVAQKFVETHPEFIGIKIIYNDHRSKDVAVIAESIRMAMGLRIKFPTVVAGFDLVGHEDTGHSLHDYKEALMIPAKDGVKLPYFFHAGETDWQGTSIDRNILDALMLNTTRIGHGFALSKHPAVRTYSWKKDIPIEVCPISNQVLKLVSDLRNHPVATLMATGHPMVISSDDPAMFGAKGLSYDFYEVFMGIGGMKADLRTLKQLAMNSIKYSTLLESEKNTFMEIWAKRWDKFIADVATK

SEQ ID NO: 755 - protein, 482 aa, synthetic construct
  REGION 1..482: note = human ADA2 R219Q/S262N/K469D, mature numbering
IDETRAHLLLKEKMMRLGGRLVLNTKEELANERLMTLKIAEMKEAMRTLIFPPSMHFFQAKHLIERSQVFNILRMMPKGAALHLHDIGIVTMDWLVRNVTYRPHCHICFTPRGIMQFRFAHPTPRPSEKCSKWILLEDYRKRVQNVTEFDDSLLRNFTLVTQHPEVIYTNQNVVWSKFETIFFTISGLIHYAPVFRDYVFRSMQEFYEDNVLYMEIRAQLLPVYELSGEHHDEEWSVKTYQEVAQKFVETHPEFIGIKIIYNDHRSKDVAVIAESIRMAMGLRIKFPTVVAGFDLVGHEDTGHSLHDYKEALMIPAKDGVKLPYFFHAGETDWQGTSIDRNILDALMLNTTRIGHGFALSKHPAVRTYSWKKDIPIEVCPISNQVLKLVSDLRNHPVATLMATGHPMVISSDDPAMFGAKGLSYDFYEVFMGIGGMKADLRTLKQLAMNSIKYSTLLESEKNTFMEIWDKRWDKFIADVATK

SEQ ID NO: 756 - protein, 482 aa, synthetic construct
  REGION 1..482: note = human ADA2 R219Q/S262N/K469E, mature numbering
IDETRAHLLLKEKMMRLGGRLVLNTKEELANERLMTLKIAEMKEAMRTLIFPPSMHFFQAKHLIERSQVFNILRMMPKGAALHLHDIGIVTMDWLVRNVTYRPHCHICFTPRGIMQFRFAHPTPRPSEKCSKWILLEDYRKRVQNVTEFDDSLLRNFTLVTQHPEVIYTNQNVVWSKFETIFFTISGLIHYAPVFRDYVFRSMQEFYEDNVLYMEIRAQLLPVYELSGEHHDEEWSVKTYQEVAQKFVETHPEFIGIKIIYNDHRSKDVAVIAESIRMAMGLRIKFPTVVAGFDLVGHEDTGHSLHDYKEALMIPAKDGVKLPYFFHAGETDWQGTSIDRNILDALMLNTTRIGHGFALSKHPAVRTYSWKKDIPIEVCPISNQVLKLVSDLRNHPVATLMATGHPMVISSDDPAMFGAKGLSYDFYEVFMGIGGMKADLRTLKQLAMNSIKYSTLLESEKNTFMEIWEKRWDKFIADVATK

SEQ ID NO: 757 - protein, 482 aa, synthetic construct
  REGION 1..482: note = human ADA2 R219Q/S262N/K470A, mature numbering
IDETRAHLLLKEKMMRLGGRLVLNTKEELANERLMTLKIAEMKEAMRTLIFPPSMHFFQAKHLIERSQVFNILRMMPKGAALHLHDIGIVTMDWLVRNVTYRPHCHICFTPRGIMQFRFAHPTPRPSEKCSKWILLEDYRKRVQNVTEFDDSLLRNFTLVTQHPEVIYTNQNVVWSKFETIFFTISGLIHYAPVFRDYVFRSMQEFYEDNVLYMEIRAQLLPVYELSGEHHDEEWSVKTYQEVAQKFVETHPEFIGIKIIYNDHRSKDVAVIAESIRMAMGLRIKFPTVVAGFDLVGHEDTGHSLHDYKEALMIPAKDGVKLPYFFHAGETDWQGTSIDRNILDALMLNTTRIGHGFALSKHPAVRTYSWKKDIPIEVCPISNQVLKLVSDLRNHPVATLMATGHPMVISSDDPAMFGAKGLSYDFYEVFMGIGGMKADLRTLKQLAMNSIKYSTLLESEKNTFMEIWKARWDKFIADVATK

SEQ ID NO: 758 - protein, 482 aa, synthetic construct
  REGION 1..482: note = human ADA2 R219Q/S262N/K470D, mature numbering
IDETRAHLLLKEKMMRLGGRLVLNTKEELANERLMTLKIAEMKEAMRTLIFPPSMHFFQAKHLIERSQVFNILRMMPKGAALHLHDIGIVTMDWLVRNVTYRPHCHICFTPRGIMQFRFAHPTPRPSEKCSKWILLEDYRKRVQNVTEFDDSLLRNFTLVTQHPEVIYTNQNVVWSKFETIFFTISGLIHYAPVFRDYVFRSMQEFYEDNVLYMEIRAQLLPVYELSGEHHDEEWSVKTYQEVAQKFVETHPEFIGIKIIYNDHRSKDVAVIAESIRMAMGLRIKFPTVVAGFDLVGHEDTGHSLHDYKEALMIPAKDGVKLPYFFHAGETDWQGTSIDRNILDALMLNTTRIGHGFALSKHPAVRTYSWKKDIPIEVCPISNQVLKLVSDLRNHPVATLMATGHPMVISSDDPAMFGAKGLSYDFYEVFMGIGGMKADLRTLKQLAMNSIKYSTLLESEKNTFMEIWKDRWDKFIADVATK

SEQ ID NO: 759 - protein, 482 aa, synthetic construct
  REGION 1..482: note = human ADA2 R219Q/S262N/K470E, mature numbering
IDETRAHLLLKEKMMRLGGRLVLNTKEELANERLMTLKIAEMKEAMRTLIFPPSMHFFQAKHLIERSQVFNILRMMPKGAALHLHDIGIVTMDWLVRNVTYRPHCHICFTPRGIMQFRFAHPTPRPSEKCSKWILLEDYRKRVQNVTEFDDSLLRNFTLVTQHPEVIYTNQNVVWSKFETIFFTISGLIHYAPVFRDYVFRSMQEFYEDNVLYMEIRAQLLPVYELSGEHHDEEWSVKTYQEVAQKFVETHPEFIGIKIIYNDHRSKDVAVIAESIRMAMGLRIKFPTVVAGFDLVGHEDTGHSLHDYKEALMIPAKDGVKLPYFFHAGETDWQGTSIDRNILDALMLNTTRIGHGFALSKHPAVRTYSWKKDIPIEVCPISNQVLKLVSDLRNHPVATLMATGHPMVISSDDPAMFGAKGLSYDFYEVFMGIGGMKADLRTLKQLAMNSIKYSTLLESEKNTFMEIWKERWDKFIADVATK

SEQ ID NO: 760 - protein, 482 aa, synthetic construct
  REGION 1..482: note = human ADA2 R219Q/S262N/D86A, mature numbering
IDETRAHLLLKEKMMRLGGRLVLNTKEELANERLMTLKIAEMKEAMRTLIFPPSMHFFQAKHLIERSQVFNILRMMPKGAALHLHAIGIVTMDWLVRNVTYRPHCHICFTPRGIMQFRFAHPTPRPSEKCSKWILLEDYRKRVQNVTEFDDSLLRNFTLVTQHPEVIYTNQNVVWSKFETIFFTISGLIHYAPVFRDYVFRSMQEFYEDNVLYMEIRAQLLPVYELSGEHHDEEWSVKTYQEVAQKFVETHPEFIGIKIIYNDHRSKDVAVIAESIRMAMGLRIKFPTVVAGFDLVGHEDTGHSLHDYKEALMIPAKDGVKLPYFFHAGETDWQGTSIDRNILDALMLNTTRIGHGFALSKHPAVRTYSWKKDIPIEVCPISNQVLKLVSDLRNHPVATLMATGHPMVISSDDPAMFGAKGLSYDFYEVFMGIGGMKADLRTLKQLAMNSIKYSTLLESEKNTFMEIWKKRWDKFIADVATK

SEQ ID NO: 761 - protein, 482 aa, synthetic construct
  REGION 1..482: note = human ADA2 R219Q/S262N/D86C, mature numbering
IDETRAHLLLKEKMMRLGGRLVLNTKEELANERLMTLKIAEMKEAMRTLIFPPSMHFFQAKHLIERSQVFNILRMMPKGAALHLHCIGIVTMDWLVRNVTYRPHCHICFTPRGIMQFRFAHPTPRPSEKCSKWILLEDYRKRVQNVTEFDDSLLRNFTLVTQHPEVIYTNQNVVWSKFETIFFTISGLIHYAPVFRDYVFRSMQEFYEDNVLYMEIRAQLLPVYELSGEHHDEEWSVKTYQEVAQKFVETHPEFIGIKIIYNDHRSKDVAVIAESIRMAMGLRIKFPTVVAGFDLVGHEDTGHSLHDYKEALMIPAKDGVKLPYFFHAGETDWQGTSIDRNILDALMLNTTRIGHGFALSKHPAVRTYSWKKDIPIEVCPISNQVLKLVSDLRNHPVATLMATGHPMVISSDDPAMFGAKGLSYDFYEVFMGIGGMKADLRTLKQLAMNSIKYSTLLESEKNTFMEIWKKRWDKFIADVATK

SEQ ID NO: 762 - protein, 482 aa, synthetic construct
  REGION 1..482: note = human ADA2 R219Q/S262N/D86E, mature numbering
IDETRAHLLLKEKMMRLGGRLVLNTKEELANERLMTLKIAEMKEAMRTLIFPPSMHFFQAKHLIERSQVFNILRMMPKGAALHLHEIGIVTMDWLVRNVTYRPHCHICFTPRGIMQFRFAHPTPRPSEKCSKWILLEDYRKRVQNVTEFDDSLLRNFTLVTQHPEVIYTNQNVVWSKFETIFFTISGLIHYAPVFRDYVFRSMQEFYEDNVLYMEIRAQLLPVYELSGEHHDEEWSVKTYQEVAQKFVETHPEFIGIKIIYNDHRSKDVAVIAESIRMAMGLRIKFPTVVAGFDLVGHEDTGHSLHDYKEALMIPAKDGVKLPYFFHAGETDWQGTSIDRNILDALMLNTTRIGHGFALSKHPAVRTYSWKKDIPIEVCPISNQVLKLVSDLRNHPVATLMATGHPMVISSDDPAMFGAKGLSYDFYEVFMGIGGMKADLRTLKQLAMNSIKYSTLLESEKNTFMEIWKKRWDKFIADVATK

SEQ ID NO: 763 - protein, 482 aa, synthetic construct
  REGION 1..482: note = human ADA2 R219Q/S262N/D86F, mature numbering
IDETRAHLLLKEKMMRLGGRLVLNTKEELANERLMTLKIAEMKEAMRTLIFPPSMHFFQAKHLIERSQVFNILRMMPKGAALHLHFIGIVTMDWLVRNVTYRPHCHICFTPRGIMQFRFAHPTPRPSEKCSKWILLEDYRKRVQNVTEFDDSLLRNFTLVTQHPEVIYTNQNVVWSKFETIFFTISGLIHYAPVFRDYVFRSMQEFYEDNVLYMEIRAQLLPVYELSGEHHDEEWSVKTYQEVAQKFVETHPEFIGIKIIYNDHRSKDVAVIAESIRMAMGLRIKFPTVVAGFDLVGHEDTGHSLHDYKEALMIPAKDGVKLPYFFHAGETDWQGTSIDRNILDALMLNTTRIGHGFALSKHPAVRTYSWKKDIPIEVCPISNQVLKLVSDLRNHPVATLMATGHPMVISSDDPAMFGAKGLSYDFYEVFMGIGGMKADLRTLKQLAMNSIKYSTLLESEKNTFMEIWKKRWDKFIADVATK

SEQ ID NO: 764 - protein, 482 aa, synthetic construct
  REGION 1..482: note = human ADA2 R219Q/S262N/D86G, mature numbering
IDETRAHLLLKEKMMRLGGRLVLNTKEELANERLMTLKIAEMKEAMRTLIFPPSMHFFQAKHLIERSQVFNILRMMPKGAALHLHGIGIVTMDWLVRNVTYRPHCHICFTPRGIMQFRFAHPTPRPSEKCSKWILLEDYRKRVQNVTEFDDSLLRNFTLVTQHPEVIYTNQNVVWSKFETIFFTISGLIHYAPVFRDYVFRSMQEFYEDNVLYMEIRAQLLPVYELSGEHHDEEWSVKTYQEVAQKFVETHPEFIGIKIIYNDHRSKDVAVIAESIRMAMGLRIKFPTVVAGFDLVGHEDTGHSLHDYKEALMIPAKDGVKLPYFFHAGETDWQGTSIDRNILDALMLNTTRIGHGFALSKHPAVRTYSWKKDIPIEVCPISNQVLKLVSDLRNHPVATLMATGHPMVISSDDPAMFGAKGLSYDFYEVFMGIGGMKADLRTLKQLAMNSIKYSTLLESEKNTFMEIWKKRWDKFIADVATK

SEQ ID NO: 765 - protein, 482 aa, synthetic construct
  REGION 1..482: note = human ADA2 R219Q/S262N/D86H, mature numbering
IDETRAHLLLKEKMMRLGGRLVLNTKEELANERLMTLKIAEMKEAMRTLIFPPSMHFFQAKHLIERSQVFNILRMMPKGAALHLHHIGIVTMDWLVRNVTYRPHCHICFTPRGIMQFRFAHPTPRPSEKCSKWILLEDYRKRVQNVTEFDDSLLRNFTLVTQHPEVIYTNQNVVWSKFETIFFTISGLIHYAPVFRDYVFRSMQEFYEDNVLYMEIRAQLLPVYELSGEHHDEEWSVKTYQEVAQKFVETHPEFIGIKIIYNDHRSKDVAVIAESIRMAMGLRIKFPTVVAGFDLVGHEDTGHSLHDYKEALMIPAKDGVKLPYFFHAGETDWQGTSIDRNILDALMLNTTRIGHGFALSKHPAVRTYSWKKDIPIEVCPISNQVLKLVSDLRNHPVATLMATGHPMVISSDDPAMFGAKGLSYDFYEVFMGIGGMKADLRTLKQLAMNSIKYSTLLESEKNTFMEIWKKRWDKFIADVATK

SEQ ID NO: 766 - protein, 482 aa, synthetic construct
  REGION 1..482: note = human ADA2 R219Q/S262N/D86I, mature numbering
IDETRAHLLLKEKMMRLGGRLVLNTKEELANERLMTLKIAEMKEAMRTLIFPPSMHFFQAKHLIERSQVFNILRMMPKGAALHLHIIGIVTMDWLVRNVTYRPHCHICFTPRGIMQFRFAHPTPRPSEKCSKWILLEDYRKRVQNVTEFDDSLLRNFTLVTQHPEVIYTNQNVVWSKFETIFFTISGLIHYAPVFRDYVFRSMQEFYEDNVLYMEIRAQLLPVYELSGEHHDEEWSVKTYQEVAQKFVETHPEFIGIKIIYNDHRSKDVAVIAESIRMAMGLRIKFPTVVAGFDLVGHEDTGHSLHDYKEALMIPAKDGVKLPYFFHAGETDWQGTSIDRNILDALMLNTTRIGHGFALSKHPAVRTYSWKKDIPIEVCPISNQVLKLVSDLRNHPVATLMATGHPMVISSDDPAMFGAKGLSYDFYEVFMGIGGMKADLRTLKQLAMNSIKYSTLLESEKNTFMEIWKKRWDKFIADVATK

SEQ ID NO: 767 - protein, 482 aa, synthetic construct
  REGION 1..482: note = human ADA2 R219Q/S262N/D86K, mature numbering
IDETRAHLLLKEKMMRLGGRLVLNTKEELANERLMTLKIAEMKEAMRTLIFPPSMHFFQAKHLIERSQVFNILRMMPKGAALHLHKIGIVTMDWLVRNVTYRPHCHICFTPRGIMQFRFAHPTPRPSEKCSKWILLEDYRKRVQNVTEFDDSLLRNFTLVTQHPEVIYTNQNVVWSKFETIFFTISGLIHYAPVFRDYVFRSMQEFYEDNVLYMEIRAQLLPVYELSGEHHDEEWSVKTYQEVAQKFVETHPEFIGIKIIYNDHRSKDVAVIAESIRMAMGLRIKFPTVVAGFDLVGHEDTGHSLHDYKEALMIPAKDGVKLPYFFHAGETDWQGTSIDRNILDALMLNTTRIGHGFALSKHPAVRTYSWKKDIPIEVCPISNQVLKLVSDLRNHPVATLMATGHPMVISSDDPAMFGAKGLSYDFYEVFMGIGGMKADLRTLKQLAMNSIKYSTLLESEKNTFMEIWKKRWDKFIADVATK

SEQ ID NO: 768 - protein, 482 aa, synthetic construct
  REGION 1..482: note = human ADA2 R219Q/S262N/D86L, mature numbering
IDETRAHLLLKEKMMRLGGRLVLNTKEELANERLMTLKIAEMKEAMRTLIFPPSMHFFQAKHLIERSQVFNILRMMPKGAALHLHLIGIVTMDWLVRNVTYRPHCHICFTPRGIMQFRFAHPTPRPSEKCSKWILLEDYRKRVQNVTEFDDSLLRNFTLVTQHPEVIYTNQNVVWSKFETIFFTISGLIHYAPVFRDYVFRSMQEFYEDNVLYMEIRAQLLPVYELSGEHHDEEWSVKTYQEVAQKFVETHPEFIGIKIIYNDHRSKDVAVIAESIRMAMGLRIKFPTVVAGFDLVGHEDTGHSLHDYKEALMIPAKDGVKLPYFFHAGETDWQGTSIDRNILDALMLNTTRIGHGFALSKHPAVRTYSWKKDIPIEVCPISNQVLKLVSDLRNHPVATLMATGHPMVISSDDPAMFGAKGLSYDFYEVFMGIGGMKADLRTLKQLAMNSIKYSTLLESEKNTFMEIWKKRWDKFIADVATK

SEQ ID NO: 769 - protein, 482 aa, synthetic construct
  REGION 1..482: note = human ADA2 R219Q/S262N/D86M, mature numbering
IDETRAHLLLKEKMMRLGGRLVLNTKEELANERLMTLKIAEMKEAMRTLIFPPSMHFFQAKHLIERSQVFNILRMMPKGAALHLHMIGIVTMDWLVRNVTYRPHCHICFTPRGIMQFRFAHPTPRPSEKCSKWILLEDYRKRVQNVTEFDDSLLRNFTLVTQHPEVIYTNQNVVWSKFETIFFTISGLIHYAPVFRDYVFRSMQEFYEDNVLYMEIRAQLLPVYELSGEHHDEEWSVKTYQEVAQKFVETHPEFIGIKIIYNDHRSKDVAVIAESIRMAMGLRIKFPTVVAGFDLVGHEDTGHSLHDYKEALMIPAKDGVKLPYFFHAGETDWQGTSIDRNILDALMLNTTRIGHGFALSKHPAVRTYSWKKDIPIEVCPISNQVLKLVSDLRNHPVATLMATGHPMVISSDDPAMFGAKGLSYDFYEVFMGIGGMKADLRTLKQLAMNSIKYSTLLESEKNTFMEIWKKRWDKFIADVATK

SEQ ID NO: 770 - protein, 482 aa, synthetic construct
  REGION 1..482: note = human ADA2 R219Q/S262N/D86N, mature numbering
IDETRAHLLLKEKMMRLGGRLVLNTKEELANERLMTLKIAEMKEAMRTLIFPPSMHFFQAKHLIERSQVFNILRMMPKGAALHLHNIGIVTMDWLVRNVTYRPHCHICFTPRGIMQFRFAHPTPRPSEKCSKWILLEDYRKRVQNVTEFDDSLLRNFTLVTQHPEVIYTNQNVVWSKFETIFFTISGLIHYAPVFRDYVFRSMQEFYEDNVLYMEIRAQLLPVYELSGEHHDEEWSVKTYQEVAQKFVETHPEFIGIKIIYNDHRSKDVAVIAESIRMAMGLRIKFPTVVAGFDLVGHEDTGHSLHDYKEALMIPAKDGVKLPYFFHAGETDWQGTSIDRNILDALMLNTTRIGHGFALSKHPAVRTYSWKKDIPIEVCPISNQVLKLVSDLRNHPVATLMATGHPMVISSDDPAMFGAKGLSYDFYEVFMGIGGMKADLRTLKQLAMNSIKYSTLLESEKNTFMEIWKKRWDKFIADVATK

SEQ ID NO: 771 - protein, 482 aa, synthetic construct
  REGION 1..482: note = human ADA2 R219Q/S262N/D86P, mature numbering
IDETRAHLLLKEKMMRLGGRLVLNTKEELANERLMTLKIAEMKEAMRTLIFPPSMHFFQAKHLIERSQVFNILRMMPKGAALHLHPIGIVTMDWLVRNVTYRPHCHICFTPRGIMQFRFAHPTPRPSEKCSKWILLEDYRKRVQNVTEFDDSLLRNFTLVTQHPEVIYTNQNVVWSKFETIFFTISGLIHYAPVFRDYVFRSMQEFYEDNVLYMEIRAQLLPVYELSGEHHDEEWSVKTYQEVAQKFVETHPEFIGIKIIYNDHRSKDVAVIAESIRMAMGLRIKFPTVVAGFDLVGHEDTGHSLHDYKEALMIPAKDGVKLPYFFHAGETDWQGTSIDRNILDALMLNTTRIGHGFALSKHPAVRTYSWKKDIPIEVCPISNQVLKLVSDLRNHPVATLMATGHPMVISSDDPAMFGAKGLSYDFYEVFMGIGGMKADLRTLKQLAMNSIKYSTLLESEKNTFMEIWKKRWDKFIADVATK

SEQ ID NO: 772 - protein, 482 aa, synthetic construct
  REGION 1..482: note = human ADA2 R219Q/S262N/D86Q, mature numbering
IDETRAHLLLKEKMMRLGGRLVLNTKEELANERLMTLKIAEMKEAMRTLIFPPSMHFFQAKHLIERSQVFNILRMMPKGAALHLHQIGIVTMDWLVRNVTYRPHCHICFTPRGIMQFRFAHPTPRPSEKCSKWILLEDYRKRVQNVTEFDDSLLRNFTLVTQHPEVIYTNQNVVWSKFETIFFTISGLIHYAPVFRDYVFRSMQEFYEDNVLYMEIRAQLLPVYELSGEHHDEEWSVKTYQEVAQKFVETHPEFIGIKIIYNDHRSKDVAVIAESIRMAMGLRIKFPTVVAGFDLVGHEDTGHSLHDYKEALMIPAKDGVKLPYFFHAGETDWQGTSIDRNILDALMLNTTRIGHGFALSKHPAVRTYSWKKDIPIEVCPISNQVLKLVSDLRNHPVATLMATGHPMVISSDDPAMFGAKGLSYDFYEVFMGIGGMKADLRTLKQLAMNSIKYSTLLESEKNTFMEIWKKRWDKFIADVATK

SEQ ID NO: 773 - protein, 482 aa, synthetic construct
  REGION 1..482: note = human ADA2 R219Q/S262N/D86R, mature numbering
IDETRAHLLLKEKMMRLGGRLVLNTKEELANERLMTLKIAEMKEAMRTLIFPPSMHFFQAKHLIERSQVFNILRMMPKGAALHLHRIGIVTMDWLVRNVTYRPHCHICFTPRGIMQFRFAHPTPRPSEKCSKWILLEDYRKRVQNVTEFDDSLLRNFTLVTQHPEVIYTNQNVVWSKFETIFFTISGLIHYAPVFRDYVFRSMQEFYEDNVLYMEIRAQLLPVYELSGEHHDEEWSVKTYQEVAQKFVETHPEFIGIKIIYNDHRSKDVAVIAESIRMAMGLRIKFPTVVAGFDLVGHEDTGHSLHDYKEALMIPAKDGVKLPYFFHAGETDWQGTSIDRNILDALMLNTTRIGHGFALSKHPAVRTYSWKKDIPIEVCPISNQVLKLVSDLRNHPVATLMATGHPMVISSDDPAMFGAKGLSYDFYEVFMGIGGMKADLRTLKQLAMNSIKYSTLLESEKNTFMEIWKKRWDKFIADVATK

SEQ ID NO: 774 - protein, 482 aa, synthetic construct
  REGION 1..482: note = human ADA2 R219Q/S262N/D86S, mature numbering
IDETRAHLLLKEKMMRLGGRLVLNTKEELANERLMTLKIAEMKEAMRTLIFPPSMHFFQAKHLIERSQVFNILRMMPKGAALHLHSIGIVTMDWLVRNVTYRPHCHICFTPRGIMQFRFAHPTPRPSEKCSKWILLEDYRKRVQNVTEFDDSLLRNFTLVTQHPEVIYTNQNVVWSKFETIFFTISGLIHYAPVFRDYVFRSMQEFYEDNVLYMEIRAQLLPVYELSGEHHDEEWSVKTYQEVAQKFVETHPEFIGIKIIYNDHRSKDVAVIAESIRMAMGLRIKFPTVVAGFDLVGHEDTGHSLHDYKEALMIPAKDGVKLPYFFHAGETDWQGTSIDRNILDALMLNTTRIGHGFALSKHPAVRTYSWKKDIPIEVCPISNQVLKLVSDLRNHPVATLMATGHPMVISSDDPAMFGAKGLSYDFYEVFMGIGGMKADLRTLKQLAMNSIKYSTLLESEKNTFMEIWKKRWDKFIADVATK

SEQ ID NO: 775 - protein, 482 aa, synthetic construct
  REGION 1..482: note = human ADA2 R219Q/S262N/D86T, mature numbering
IDETRAHLLLKEKMMRLGGRLVLNTKEELANERLMTLKIAEMKEAMRTLIFPPSMHFFQAKHLIERSQVFNILRMMPKGAALHLHTIGIVTMDWLVRNVTYRPHCHICFTPRGIMQFRFAHPTPRPSEKCSKWILLEDYRKRVQNVTEFDDSLLRNFTLVTQHPEVIYTNQNVVWSKFETIFFTISGLIHYAPVFRDYVFRSMQEFYEDNVLYMEIRAQLLPVYELSGEHHDEEWSVKTYQEVAQKFVETHPEFIGIKIIYNDHRSKDVAVIAESIRMAMGLRIKFPTVVAGFDLVGHEDTGHSLHDYKEALMIPAKDGVKLPYFFHAGETDWQGTSIDRNILDALMLNTTRIGHGFALSKHPAVRTYSWKKDIPIEVCPISNQVLKLVSDLRNHPVATLMATGHPMVISSDDPAMFGAKGLSYDFYEVFMGIGGMKADLRTLKQLAMNSIKYSTLLESEKNTFMEIWKKRWDKFIADVATK

SEQ ID NO: 776 - protein, 482 aa, synthetic construct
  REGION 1..482: note = human ADA2 R219Q/S262N/D86V, mature numbering
IDETRAHLLLKEKMMRLGGRLVLNTKEELANERLMTLKIAEMKEAMRTLIFPPSMHFFQAKHLIERSQVFNILRMMPKGAALHLHVIGIVTMDWLVRNVTYRPHCHICFTPRGIMQFRFAHPTPRPSEKCSKWILLEDYRKRVQNVTEFDDSLLRNFTLVTQHPEVIYTNQNVVWSKFETIFFTISGLIHYAPVFRDYVFRSMQEFYEDNVLYMEIRAQLLPVYELSGEHHDEEWSVKTYQEVAQKFVETHPEFIGIKIIYNDHRSKDVAVIAESIRMAMGLRIKFPTVVAGFDLVGHEDTGHSLHDYKEALMIPAKDGVKLPYFFHAGETDWQGTSIDRNILDALMLNTTRIGHGFALSKHPAVRTYSWKKDIPIEVCPISNQVLKLVSDLRNHPVATLMATGHPMVISSDDPAMFGAKGLSYDFYEVFMGIGGMKADLRTLKQLAMNSIKYSTLLESEKNTFMEIWKKRWDKFIADVATK

SEQ ID NO: 777 - protein, 482 aa, synthetic construct
  REGION 1..482: note = human ADA2 R219Q/S262N/D86W, mature numbering
IDETRAHLLLKEKMMRLGGRLVLNTKEELANERLMTLKIAEMKEAMRTLIFPPSMHFFQAKHLIERSQVFNILRMMPKGAALHLHWIGIVTMDWLVRNVTYRPHCHICFTPRGIMQFRFAHPTPRPSEKCSKWILLEDYRKRVQNVTEFDDSLLRNFTLVTQHPEVIYTNQNVVWSKFETIFFTISGLIHYAPVFRDYVFRSMQEFYEDNVLYMEIRAQLLPVYELSGEHHDEEWSVKTYQEVAQKFVETHPEFIGIKIIYNDHRSKDVAVIAESIRMAMGLRIKFPTVVAGFDLVGHEDTGHSLHDYKEALMIPAKDGVKLPYFFHAGETDWQGTSIDRNILDALMLNTTRIGHGFALSKHPAVRTYSWKKDIPIEVCPISNQVLKLVSDLRNHPVATLMATGHPMVISSDDPAMFGAKGLSYDFYEVFMGIGGMKADLRTLKQLAMNSIKYSTLLESEKNTFMEIWKKRWDKFIADVATK

SEQ ID NO: 778 - protein, 482 aa, synthetic construct
  REGION 1..482: note = human ADA2 R219Q/S262N/D86Y, mature numbering
IDETRAHLLLKEKMMRLGGRLVLNTKEELANERLMTLKIAEMKEAMRTLIFPPSMHFFQAKHLIERSQVFNILRMMPKGAALHLHYIGIVTMDWLVRNVTYRPHCHICFTPRGIMQFRFAHPTPRPSEKCSKWILLEDYRKRVQNVTEFDDSLLRNFTLVTQHPEVIYTNQNVVWSKFETIFFTISGLIHYAPVFRDYVFRSMQEFYEDNVLYMEIRAQLLPVYELSGEHHDEEWSVKTYQEVAQKFVETHPEFIGIKIIYNDHRSKDVAVIAESIRMAMGLRIKFPTVVAGFDLVGHEDTGHSLHDYKEALMIPAKDGVKLPYFFHAGETDWQGTSIDRNILDALMLNTTRIGHGFALSKHPAVRTYSWKKDIPIEVCPISNQVLKLVSDLRNHPVATLMATGHPMVISSDDPAMFGAKGLSYDFYEVFMGIGGMKADLRTLKQLAMNSIKYSTLLESEKNTFMEIWKKRWDKFIADVATK

SEQ ID NO: 779 - protein, 482 aa, synthetic construct
  REGION 1..482: note = human ADA2 R219Q/S262N/E179C, mature numbering
IDETRAHLLLKEKMMRLGGRLVLNTKEELANERLMTLKIAEMKEAMRTLIFPPSMHFFQAKHLIERSQVFNILRMMPKGAALHLHDIGIVTMDWLVRNVTYRPHCHICFTPRGIMQFRFAHPTPRPSEKCSKWILLEDYRKRVQNVTEFDDSLLRNFTLVTQHPEVIYTNQNVVWSKFCTIFFTISGLIHYAPVFRDYVFRSMQEFYEDNVLYMEIRAQLLPVYELSGEHHDEEWSVKTYQEVAQKFVETHPEFIGIKIIYNDHRSKDVAVIAESIRMAMGLRIKFPTVVAGFDLVGHEDTGHSLHDYKEALMIPAKDGVKLPYFFHAGETDWQGTSIDRNILDALMLNTTRIGHGFALSKHPAVRTYSWKKDIPIEVCPISNQVLKLVSDLRNHPVATLMATGHPMVISSDDPAMFGAKGLSYDFYEVFMGIGGMKADLRTLKQLAMNSIKYSTLLESEKNTFMEIWKKRWDKFIADVATK

SEQ ID NO: 780 - protein, 482 aa, synthetic construct
  REGION 1..482: note = human ADA2 R219Q/S262N/E179F, mature numbering
IDETRAHLLLKEKMMRLGGRLVLNTKEELANERLMTLKIAEMKEAMRTLIFPPSMHFFQAKHLIERSQVFNILRMMPKGAALHLHDIGIVTMDWLVRNVTYRPHCHICFTPRGIMQFRFAHPTPRPSEKCSKWILLEDYRKRVQNVTEFDDSLLRNFTLVTQHPEVIYTNQNVVWSKFFTIFFTISGLIHYAPVFRDYVFRSMQEFYEDNVLYMEIRAQLLPVYELSGEHHDEEWSVKTYQEVAQKFVETHPEFIGIKIIYNDHRSKDVAVIAESIRMAMGLRIKFPTVVAGFDLVGHEDTGHSLHDYKEALMIPAKDGVKLPYFFHAGETDWQGTSIDRNILDALMLNTTRIGHGFALSKHPAVRTYSWKKDIPIEVCPISNQVLKLVSDLRNHPVATLMATGHPMVISSDDPAMFGAKGLSYDFYEVFMGIGGMKADLRTLKQLAMNSIKYSTLLESEKNTFMEIWKKRWDKFIADVATK

SEQ ID NO: 781 - protein, 482 aa, synthetic construct
  REGION 1..482: note = human ADA2 R219Q/S262N/E179H, mature numbering
IDETRAHLLLKEKMMRLGGRLVLNTKEELANERLMTLKIAEMKEAMRTLIFPPSMHFFQAKHLIERSQVFNILRMMPKGAALHLHDIGIVTMDWLVRNVTYRPHCHICFTPRGIMQFRFAHPTPRPSEKCSKWILLEDYRKRVQNVTEFDDSLLRNFTLVTQHPEVIYTNQNVVWSKFHTIFFTISGLIHYAPVFRDYVFRSMQEFYEDNVLYMEIRAQLLPVYELSGEHHDEEWSVKTYQEVAQKFVETHPEFIGIKIIYNDHRSKDVAVIAESIRMAMGLRIKFPTVVAGFDLVGHEDTGHSLHDYKEALMIPAKDGVKLPYFFHAGETDWQGTSIDRNILDALMLNTTRIGHGFALSKHPAVRTYSWKKDIPIEVCPISNQVLKLVSDLRNHPVATLMATGHPMVISSDDPAMFGAKGLSYDFYEVFMGIGGMKADLRTLKQLAMNSIKYSTLLESEKNTFMEIWKKRWDKFIADVATK

SEQ ID NO: 782 - protein, 482 aa, synthetic construct
  REGION 1..482: note = human ADA2 R219Q/S262N/E179I, mature numbering
IDETRAHLLLKEKMMRLGGRLVLNTKEELANERLMTLKIAEMKEAMRTLIFPPSMHFFQAKHLIERSQVFNILRMMPKGAALHLHDIGIVTMDWLVRNVTYRPHCHICFTPRGIMQFRFAHPTPRPSEKCSKWILLEDYRKRVQNVTEFDDSLLRNFTLVTQHPEVIYTNQNVVWSKFITIFFTISGLIHYAPVFRDYVFRSMQEFYEDNVLYMEIRAQLLPVYELSGEHHDEEWSVKTYQEVAQKFVETHPEFIGIKIIYNDHRSKDVAVIAESIRMAMGLRIKFPTVVAGFDLVGHEDTGHSLHDYKEALMIPAKDGVKLPYFFHAGETDWQGTSIDRNILDALMLNTTRIGHGFALSKHPAVRTYSWKKDIPIEVCPISNQVLKLVSDLRNHPVATLMATGHPMVISSDDPAMFGAKGLSYDFYEVFMGIGGMKADLRTLKQLAMNSIKYSTLLESEKNTFMEIWKKRWDKFIADVATK

SEQ ID NO: 783 - protein, 482 aa, synthetic construct
  REGION 1..482: note = human ADA2 R219Q/S262N/E179K, mature numbering
IDETRAHLLLKEKMMRLGGRLVLNTKEELANERLMTLKIAEMKEAMRTLIFPPSMHFFQAKHLIERSQVFNILRMMPKGAALHLHDIGIVTMDWLVRNVTYRPHCHICFTPRGIMQFRFAHPTPRPSEKCSKWILLEDYRKRVQNVTEFDDSLLRNFTLVTQHPEVIYTNQNVVWSKFKTIFFTISGLIHYAPVFRDYVFRSMQEFYEDNVLYMEIRAQLLPVYELSGEHHDEEWSVKTYQEVAQKFVETHPEFIGIKIIYNDHRSKDVAVIAESIRMAMGLRIKFPTVVAGFDLVGHEDTGHSLHDYKEALMIPAKDGVKLPYFFHAGETDWQGTSIDRNILDALMLNTTRIGHGFALSKHPAVRTYSWKKDIPIEVCPISNQVLKLVSDLRNHPVATLMATGHPMVISSDDPAMFGAKGLSYDFYEVFMGIGGMKADLRTLKQLAMNSIKYSTLLESEKNTFMEIWKKRWDKFIADVATK

SEQ ID NO: 784 - protein, 482 aa, synthetic construct
  REGION 1..482: note = human ADA2 R219Q/S262N/E179L, mature numbering
IDETRAHLLLKEKMMRLGGRLVLNTKEELANERLMTLKIAEMKEAMRTLIFPPSMHFFQAKHLIERSQVFNILRMMPKGAALHLHDIGIVTMDWLVRNVTYRPHCHICFTPRGIMQFRFAHPTPRPSEKCSKWILLEDYRKRVQNVTEFDDSLLRNFTLVTQHPEVIYTNQNVVWSKFLTIFFTISGLIHYAPVFRDYVFRSMQEFYEDNVLYMEIRAQLLPVYELSGEHHDEEWSVKTYQEVAQKFVETHPEFIGIKIIYNDHRSKDVAVIAESIRMAMGLRIKFPTVVAGFDLVGHEDTGHSLHDYKEALMIPAKDGVKLPYFFHAGETDWQGTSIDRNILDALMLNTTRIGHGFALSKHPAVRTYSWKKDIPIEVCPISNQVLKLVSDLRNHPVATLMATGHPMVISSDDPAMFGAKGLSYDFYEVFMGIGGMKADLRTLKQLAMNSIKYSTLLESEKNTFMEIWKKRWDKFIADVATK

SEQ ID NO: 785 - protein, 482 aa, synthetic construct
  REGION 1..482: note = human ADA2 R219Q/S262N/E179M, mature numbering
IDETRAHLLLKEKMMRLGGRLVLNTKEELANERLMTLKIAEMKEAMRTLIFPPSMHFFQAKHLIERSQVFNILRMMPKGAALHLHDIGIVTMDWLVRNVTYRPHCHICFTPRGIMQFRFAHPTPRPSEKCSKWILLEDYRKRVQNVTEFDDSLLRNFTLVTQHPEVIYTNQNVVWSKFMTIFFTISGLIHYAPVFRDYVFRSMQEFYEDNVLYMEIRAQLLPVYELSGEHHDEEWSVKTYQEVAQKFVETHPEFIGIKIIYNDHRSKDVAVIAESIRMAMGLRIKFPTVVAGFDLVGHEDTGHSLHDYKEALMIPAKDGVKLPYFFHAGETDWQGTSIDRNILDALMLNTTRIGHGFALSKHPAVRTYSWKKDIPIEVCPISNQVLKLVSDLRNHPVATLMATGHPMVISSDDPAMFGAKGLSYDFYEVFMGIGGMKADLRTLKQLAMNSIKYSTLLESEKNTFMEIWKKRWDKFIADVATK

SEQ ID NO: 786 - protein, 482 aa, synthetic construct
  REGION 1..482: note = human ADA2 R219Q/S262N/E179N, mature numbering
IDETRAHLLLKEKMMRLGGRLVLNTKEELANERLMTLKIAEMKEAMRTLIFPPSMHFFQAKHLIERSQVFNILRMMPKGAALHLHDIGIVTMDWLVRNVTYRPHCHICFTPRGIMQFRFAHPTPRPSEKCSKWILLEDYRKRVQNVTEFDDSLLRNFTLVTQHPEVIYTNQNVVWSKFNTIFFTISGLIHYAPVFRDYVFRSMQEFYEDNVLYMEIRAQLLPVYELSGEHHDEEWSVKTYQEVAQKFVETHPEFIGIKIIYNDHRSKDVAVIAESIRMAMGLRIKFPTVVAGFDLVGHEDTGHSLHDYKEALMIPAKDGVKLPYFFHAGETDWQGTSIDRNILDALMLNTTRIGHGFALSKHPAVRTYSWKKDIPIEVCPISNQVLKLVSDLRNHPVATLMATGHPMVISSDDPAMFGAKGLSYDFYEVFMGIGGMKADLRTLKQLAMNSIKYSTLLESEKNTFMEIWKKRWDKFIADVATK

SEQ ID NO: 787 - protein, 482 aa, synthetic construct
  REGION 1..482: note = human ADA2 R219Q/S262N/E179P, mature numbering
IDETRAHLLLKEKMMRLGGRLVLNTKEELANERLMTLKIAEMKEAMRTLIFPPSMHFFQAKHLIERSQVFNILRMMPKGAALHLHDIGIVTMDWLVRNVTYRPHCHICFTPRGIMQFRFAHPTPRPSEKCSKWILLEDYRKRVQNVTEFDDSLLRNFTLVTQHPEVIYTNQNVVWSKFPTIFFTISGLIHYAPVFRDYVFRSMQEFYEDNVLYMEIRAQLLPVYELSGEHHDEEWSVKTYQEVAQKFVETHPEFIGIKIIYNDHRSKDVAVIAESIRMAMGLRIKFPTVVAGFDLVGHEDTGHSLHDYKEALMIPAKDGVKLPYFFHAGETDWQGTSIDRNILDALMLNTTRIGHGFALSKHPAVRTYSWKKDIPIEVCPISNQVLKLVSDLRNHPVATLMATGHPMVISSDDPAMFGAKGLSYDFYEVFMGIGGMKADLRTLKQLAMNSIKYSTLLESEKNTFMEIWKKRWDKFIADVATK

SEQ ID NO: 788 - protein, 482 aa, synthetic construct
  REGION 1..482: note = human ADA2 R219Q/S262N/E179Q, mature numbering
IDETRAHLLLKEKMMRLGGRLVLNTKEELANERLMTLKIAEMKEAMRTLIFPPSMHFFQAKHLIERSQVFNILRMMPKGAALHLHDIGIVTMDWLVRNVTYRPHCHICFTPRGIMQFRFAHPTPRPSEKCSKWILLEDYRKRVQNVTEFDDSLLRNFTLVTQHPEVIYTNQNVVWSKFQTIFFTISGLIHYAPVFRDYVFRSMQEFYEDNVLYMEIRAQLLPVYELSGEHHDEEWSVKTYQEVAQKFVETHPEFIGIKIIYNDHRSKDVAVIAESIRMAMGLRIKFPTVVAGFDLVGHEDTGHSLHDYKEALMIPAKDGVKLPYFFHAGETDWQGTSIDRNILDALMLNTTRIGHGFALSKHPAVRTYSWKKDIPIEVCPISNQVLKLVSDLRNHPVATLMATGHPMVISSDDPAMFGAKGLSYDFYEVFMGIGGMKADLRTLKQLAMNSIKYSTLLESEKNTFMEIWKKRWDKFIADVATK

SEQ ID NO: 789 - protein, 482 aa, synthetic construct
  REGION 1..482: note = human ADA2 R219Q/S262N/E179R, mature numbering
IDETRAHLLLKEKMMRLGGRLVLNTKEELANERLMTLKIAEMKEAMRTLIFPPSMHFFQAKHLIERSQVFNILRMMPKGAALHLHDIGIVTMDWLVRNVTYRPHCHICFTPRGIMQFRFAHPTPRPSEKCSKWILLEDYRKRVQNVTEFDDSLLRNFTLVTQHPEVIYTNQNVVWSKFRTIFFTISGLIHYAPVFRDYVFRSMQEFYEDNVLYMEIRAQLLPVYELSGEHHDEEWSVKTYQEVAQKFVETHPEFIGIKIIYNDHRSKDVAVIAESIRMAMGLRIKFPTVVAGFDLVGHEDTGHSLHDYKEALMIPAKDGVKLPYFFHAGETDWQGTSIDRNILDALMLNTTRIGHGFALSKHPAVRTYSWKKDIPIEVCPISNQVLKLVSDLRNHPVATLMATGHPMVISSDDPAMFGAKGLSYDFYEVFMGIGGMKADLRTLKQLAMNSIKYSTLLESEKNTFMEIWKKRWDKFIADVATK

SEQ ID NO: 790 - protein, 482 aa, synthetic construct
  REGION 1..482: note = human ADA2 R219Q/S262N/E179W, mature numbering
IDETRAHLLLKEKMMRLGGRLVLNTKEELANERLMTLKIAEMKEAMRTLIFPPSMHFFQAKHLIERSQVFNILRMMPKGAALHLHDIGIVTMDWLVRNVTYRPHCHICFTPRGIMQFRFAHPTPRPSEKCSKWILLEDYRKRVQNVTEFDDSLLRNFTLVTQHPEVIYTNQNVVWSKFWTIFFTISGLIHYAPVFRDYVFRSMQEFYEDNVLYMEIRAQLLPVYELSGEHHDEEWSVKTYQEVAQKFVETHPEFIGIKIIYNDHRSKDVAVIAESIRMAMGLRIKFPTVVAGFDLVGHEDTGHSLHDYKEALMIPAKDGVKLPYFFHAGETDWQGTSIDRNILDALMLNTTRIGHGFALSKHPAVRTYSWKKDIPIEVCPISNQVLKLVSDLRNHPVATLMATGHPMVISSDDPAMFGAKGLSYDFYEVFMGIGGMKADLRTLKQLAMNSIKYSTLLESEKNTFMEIWKKRWDKFIADVATK

SEQ ID NO: 791 - protein, 482 aa, synthetic construct
  REGION 1..482: note = human ADA2 R219Q/S262N/E179Y, mature numbering
IDETRAHLLLKEKMMRLGGRLVLNTKEELANERLMTLKIAEMKEAMRTLIFPPSMHFFQAKHLIERSQVFNILRMMPKGAALHLHDIGIVTMDWLVRNVTYRPHCHICFTPRGIMQFRFAHPTPRPSEKCSKWILLEDYRKRVQNVTEFDDSLLRNFTLVTQHPEVIYTNQNVVWSKFYTIFFTISGLIHYAPVFRDYVFRSMQEFYEDNVLYMEIRAQLLPVYELSGEHHDEEWSVKTYQEVAQKFVETHPEFIGIKIIYNDHRSKDVAVIAESIRMAMGLRIKFPTVVAGFDLVGHEDTGHSLHDYKEALMIPAKDGVKLPYFFHAGETDWQGTSIDRNILDALMLNTTRIGHGFALSKHPAVRTYSWKKDIPIEVCPISNQVLKLVSDLRNHPVATLMATGHPMVISSDDPAMFGAKGLSYDFYEVFMGIGGMKADLRTLKQLAMNSIKYSTLLESEKNTFMEIWKKRWDKFIADVATK

SEQ ID NO: 792 - protein, 482 aa, synthetic construct
  REGION 1..482: note = human ADA2 R219C/S262N, mature numbering
IDETRAHLLLKEKMMRLGGRLVLNTKEELANERLMTLKIAEMKEAMRTLIFPPSMHFFQAKHLIERSQVFNILRMMPKGAALHLHDIGIVTMDWLVRNVTYRPHCHICFTPRGIMQFRFAHPTPRPSEKCSKWILLEDYRKRVQNVTEFDDSLLRNFTLVTQHPEVIYTNQNVVWSKFETIFFTISGLIHYAPVFRDYVFRSMQEFYEDNVLYMEIRACLLPVYELSGEHHDEEWSVKTYQEVAQKFVETHPEFIGIKIIYNDHRSKDVAVIAESIRMAMGLRIKFPTVVAGFDLVGHEDTGHSLHDYKEALMIPAKDGVKLPYFFHAGETDWQGTSIDRNILDALMLNTTRIGHGFALSKHPAVRTYSWKKDIPIEVCPISNQVLKLVSDLRNHPVATLMATGHPMVISSDDPAMFGAKGLSYDFYEVFMGIGGMKADLRTLKQLAMNSIKYSTLLESEKNTFMEIWKKRWDKFIADVATK

SEQ ID NO: 793 - protein, 482 aa, synthetic construct
  REGION 1..482: note = human ADA2 R219D/S262N, mature numbering
IDETRAHLLLKEKMMRLGGRLVLNTKEELANERLMTLKIAEMKEAMRTLIFPPSMHFFQAKHLIERSQVFNILRMMPKGAALHLHDIGIVTMDWLVRNVTYRPHCHICFTPRGIMQFRFAHPTPRPSEKCSKWILLEDYRKRVQNVTEFDDSLLRNFTLVTQHPEVIYTNQNVVWSKFETIFFTISGLIHYAPVFRDYVFRSMQEFYEDNVLYMEIRADLLPVYELSGEHHDEEWSVKTYQEVAQKFVETHPEFIGIKIIYNDHRSKDVAVIAESIRMAMGLRIKFPTVVAGFDLVGHEDTGHSLHDYKEALMIPAKDGVKLPYFFHAGETDWQGTSIDRNILDALMLNTTRIGHGFALSKHPAVRTYSWKKDIPIEVCPISNQVLKLVSDLRNHPVATLMATGHPMVISSDDPAMFGAKGLSYDFYEVFMGIGGMKADLRTLKQLAMNSIKYSTLLESEKNTFMEIWKKRWDKFIADVATK

SEQ ID NO: 794 - protein, 482 aa, synthetic construct
  REGION 1..482: note = human ADA2 R219E/S262N, mature numbering
IDETRAHLLLKEKMMRLGGRLVLNTKEELANERLMTLKIAEMKEAMRTLIFPPSMHFFQAKHLIERSQVFNILRMMPKGAALHLHDIGIVTMDWLVRNVTYRPHCHICFTPRGIMQFRFAHPTPRPSEKCSKWILLEDYRKRVQNVTEFDDSLLRNFTLVTQHPEVIYTNQNVVWSKFETIFFTISGLIHYAPVFRDYVFRSMQEFYEDNVLYMEIRAELLPVYELSGEHHDEEWSVKTYQEVAQKFVETHPEFIGIKIIYNDHRSKDVAVIAESIRMAMGLRIKFPTVVAGFDLVGHEDTGHSLHDYKEALMIPAKDGVKLPYFFHAGETDWQGTSIDRNILDALMLNTTRIGHGFALSKHPAVRTYSWKKDIPIEVCPISNQVLKLVSDLRNHPVATLMATGHPMVISSDDPAMFGAKGLSYDFYEVFMGIGGMKADLRTLKQLAMNSIKYSTLLESEKNTFMEIWKKRWDKFIADVATK

SEQ ID NO: 795 - protein, 482 aa, synthetic construct
  REGION 1..482: note = human ADA2 R219F/S262N, mature numbering
IDETRAHLLLKEKMMRLGGRLVLNTKEELANERLMTLKIAEMKEAMRTLIFPPSMHFFQAKHLIERSQVFNILRMMPKGAALHLHDIGIVTMDWLVRNVTYRPHCHICFTPRGIMQFRFAHPTPRPSEKCSKWILLEDYRKRVQNVTEFDDSLLRNFTLVTQHPEVIYTNQNVVWSKFETIFFTISGLIHYAPVFRDYVFRSMQEFYEDNVLYMEIRAFLLPVYELSGEHHDEEWSVKTYQEVAQKFVETHPEFIGIKIIYNDHRSKDVAVIAESIRMAMGLRIKFPTVVAGFDLVGHEDTGHSLHDYKEALMIPAKDGVKLPYFFHAGETDWQGTSIDRNILDALMLNTTRIGHGFALSKHPAVRTYSWKKDIPIEVCPISNQVLKLVSDLRNHPVATLMATGHPMVISSDDPAMFGAKGLSYDFYEVFMGIGGMKADLRTLKQLAMNSIKYSTLLESEKNTFMEIWKKRWDKFIADVATK

SEQ ID NO: 796 - protein, 482 aa, synthetic construct
  REGION 1..482: note = human ADA2 R219G/S262N, mature numbering
IDETRAHLLLKEKMMRLGGRLVLNTKEELANERLMTLKIAEMKEAMRTLIFPPSMHFFQAKHLIERSQVFNILRMMPKGAALHLHDIGIVTMDWLVRNVTYRPHCHICFTPRGIMQFRFAHPTPRPSEKCSKWILLEDYRKRVQNVTEFDDSLLRNFTLVTQHPEVIYTNQNVVWSKFETIFFTISGLIHYAPVFRDYVFRSMQEFYEDNVLYMEIRAGLLPVYELSGEHHDEEWSVKTYQEVAQKFVETHPEFIGIKIIYNDHRSKDVAVIAESIRMAMGLRIKFPTVVAGFDLVGHEDTGHSLHDYKEALMIPAKDGVKLPYFFHAGETDWQGTSIDRNILDALMLNTTRIGHGFALSKHPAVRTYSWKKDIPIEVCPISNQVLKLVSDLRNHPVATLMATGHPMVISSDDPAMFGAKGLSYDFYEVFMGIGGMKADLRTLKQLAMNSIKYSTLLESEKNTFMEIWKKRWDKFIADVATK

SEQ ID NO: 797 - protein, 482 aa, synthetic construct
  REGION 1..482: note = human ADA2 R219H/S262N, mature numbering
IDETRAHLLLKEKMMRLGGRLVLNTKEELANERLMTLKIAEMKEAMRTLIFPPSMHFFQAKHLIERSQVFNILRMMPKGAALHLHDIGIVTMDWLVRNVTYRPHCHICFTPRGIMQFRFAHPTPRPSEKCSKWILLEDYRKRVQNVTEFDDSLLRNFTLVTQHPEVIYTNQNVVWSKFETIFFTISGLIHYAPVFRDYVFRSMQEFYEDNVLYMEIRAHLLPVYELSGEHHDEEWSVKTYQEVAQKFVETHPEFIGIKIIYNDHRSKDVAVIAESIRMAMGLRIKFPTVVAGFDLVGHEDTGHSLHDYKEALMIPAKDGVKLPYFFHAGETDWQGTSIDRNILDALMLNTTRIGHGFALSKHPAVRTYSWKKDIPIEVCPISNQVLKLVSDLRNHPVATLMATGHPMVISSDDPAMFGAKGLSYDFYEVFMGIGGMKADLRTLKQLAMNSIKYSTLLESEKNTFMEIWKKRWDKFIADVATK

SEQ ID NO: 798 - protein, 482 aa, synthetic construct
  REGION 1..482: note = human ADA2 R219I/S262N, mature numbering
IDETRAHLLLKEKMMRLGGRLVLNTKEELANERLMTLKIAEMKEAMRTLIFPPSMHFFQAKHLIERSQVFNILRMMPKGAALHLHDIGIVTMDWLVRNVTYRPHCHICFTPRGIMQFRFAHPTPRPSEKCSKWILLEDYRKRVQNVTEFDDSLLRNFTLVTQHPEVIYTNQNVVWSKFETIFFTISGLIHYAPVFRDYVFRSMQEFYEDNVLYMEIRAILLPVYELSGEHHDEEWSVKTYQEVAQKFVETHPEFIGIKIIYNDHRSKDVAVIAESIRMAMGLRIKFPTVVAGFDLVGHEDTGHSLHDYKEALMIPAKDGVKLPYFFHAGETDWQGTSIDRNILDALMLNTTRIGHGFALSKHPAVRTYSWKKDIPIEVCPISNQVLKLVSDLRNHPVATLMATGHPMVISSDDPAMFGAKGLSYDFYEVFMGIGGMKADLRTLKQLAMNSIKYSTLLESEKNTFMEIWKKRWDKFIADVATK

SEQ ID NO: 799 - protein, 482 aa, synthetic construct
  REGION 1..482: note = human ADA2 R219L/S262N, mature numbering
IDETRAHLLLKEKMMRLGGRLVLNTKEELANERLMTLKIAEMKEAMRTLIFPPSMHFFQAKHLIERSQVFNILRMMPKGAALHLHDIGIVTMDWLVRNVTYRPHCHICFTPRGIMQFRFAHPTPRPSEKCSKWILLEDYRKRVQNVTEFDDSLLRNFTLVTQHPEVIYTNQNVVWSKFETIFFTISGLIHYAPVFRDYVFRSMQEFYEDNVLYMEIRALLLPVYELSGEHHDEEWSVKTYQEVAQKFVETHPEFIGIKIIYNDHRSKDVAVIAESIRMAMGLRIKFPTVVAGFDLVGHEDTGHSLHDYKEALMIPAKDGVKLPYFFHAGETDWQGTSIDRNILDALMLNTTRIGHGFALSKHPAVRTYSWKKDIPIEVCPISNQVLKLVSDLRNHPVATLMATGHPMVISSDDPAMFGAKGLSYDFYEVFMGIGGMKADLRTLKQLAMNSIKYSTLLESEKNTFMEIWKKRWDKFIADVATK

SEQ ID NO: 800 - protein, 482 aa, synthetic construct
  REGION 1..482: note = human ADA2 R219M/S262N, mature numbering
IDETRAHLLLKEKMMRLGGRLVLNTKEELANERLMTLKIAEMKEAMRTLIFPPSMHFFQAKHLIERSQVFNILRMMPKGAALHLHDIGIVTMDWLVRNVTYRPHCHICFTPRGIMQFRFAHPTPRPSEKCSKWILLEDYRKRVQNVTEFDDSLLRNFTLVTQHPEVIYTNQNVVWSKFETIFFTISGLIHYAPVFRDYVFRSMQEFYEDNVLYMEIRAMLLPVYELSGEHHDEEWSVKTYQEVAQKFVETHPEFIGIKIIYNDHRSKDVAVIAESIRMAMGLRIKFPTVVAGFDLVGHEDTGHSLHDYKEALMIPAKDGVKLPYFFHAGETDWQGTSIDRNILDALMLNTTRIGHGFALSKHPAVRTYSWKKDIPIEVCPISNQVLKLVSDLRNHPVATLMATGHPMVISSDDPAMFGAKGLSYDFYEVFMGIGGMKADLRTLKQLAMNSIKYSTLLESEKNTFMEIWKKRWDKFIADVATK

SEQ ID NO: 801 - protein, 482 aa, synthetic construct
  REGION 1..482: note = human ADA2 R219P/S262N, mature numbering
IDETRAHLLLKEKMMRLGGRLVLNTKEELANERLMTLKIAEMKEAMRTLIFPPSMHFFQAKHLIERSQVFNILRMMPKGAALHLHDIGIVTMDWLVRNVTYRPHCHICFTPRGIMQFRFAHPTPRPSEKCSKWILLEDYRKRVQNVTEFDDSLLRNFTLVTQHPEVIYTNQNVVWSKFETIFFTISGLIHYAPVFRDYVFRSMQEFYEDNVLYMEIRAPLLPVYELSGEHHDEEWSVKTYQEVAQKFVETHPEFIGIKIIYNDHRSKDVAVIAESIRMAMGLRIKFPTVVAGFDLVGHEDTGHSLHDYKEALMIPAKDGVKLPYFFHAGETDWQGTSIDRNILDALMLNTTRIGHGFALSKHPAVRTYSWKKDIPIEVCPISNQVLKLVSDLRNHPVATLMATGHPMVISSDDPAMFGAKGLSYDFYEVFMGIGGMKADLRTLKQLAMNSIKYSTLLESEKNTFMEIWKKRWDKFIADVATK

SEQ ID NO: 802 - protein, 482 aa, synthetic construct
  REGION 1..482: note = human ADA2 R219S/S262N, mature numbering
IDETRAHLLLKEKMMRLGGRLVLNTKEELANERLMTLKIAEMKEAMRTLIFPPSMHFFQAKHLIERSQVFNILRMMPKGAALHLHDIGIVTMDWLVRNVTYRPHCHICFTPRGIMQFRFAHPTPRPSEKCSKWILLEDYRKRVQNVTEFDDSLLRNFTLVTQHPEVIYTNQNVVWSKFETIFFTISGLIHYAPVFRDYVFRSMQEFYEDNVLYMEIRASLLPVYELSGEHHDEEWSVKTYQEVAQKFVETHPEFIGIKIIYNDHRSKDVAVIAESIRMAMGLRIKFPTVVAGFDLVGHEDTGHSLHDYKEALMIPAKDGVKLPYFFHAGETDWQGTSIDRNILDALMLNTTRIGHGFALSKHPAVRTYSWKKDIPIEVCPISNQVLKLVSDLRNHPVATLMATGHPMVISSDDPAMFGAKGLSYDFYEVFMGIGGMKADLRTLKQLAMNSIKYSTLLESEKNTFMEIWKKRWDKFIADVATK

SEQ ID NO: 803 - protein, 482 aa, synthetic construct
  REGION 1..482: note = human ADA2 R219T/S262N, mature numbering
IDETRAHLLLKEKMMRLGGRLVLNTKEELANERLMTLKIAEMKEAMRTLIFPPSMHFFQAKHLIERSQVFNILRMMPKGAALHLHDIGIVTMDWLVRNVTYRPHCHICFTPRGIMQFRFAHPTPRPSEKCSKWILLEDYRKRVQNVTEFDDSLLRNFTLVTQHPEVIYTNQNVVWSKFETIFFTISGLIHYAPVFRDYVFRSMQEFYEDNVLYMEIRATLLPVYELSGEHHDEEWSVKTYQEVAQKFVETHPEFIGIKIIYNDHRSKDVAVIAESIRMAMGLRIKFPTVVAGFDLVGHEDTGHSLHDYKEALMIPAKDGVKLPYFFHAGETDWQGTSIDRNILDALMLNTTRIGHGFALSKHPAVRTYSWKKDIPIEVCPISNQVLKLVSDLRNHPVATLMATGHPMVISSDDPAMFGAKGLSYDFYEVFMGIGGMKADLRTLKQLAMNSIKYSTLLESEKNTFMEIWKKRWDKFIADVATK

SEQ ID NO: 804 - protein, 482 aa, synthetic construct
  REGION 1..482: note = human ADA2 R219V/S262N, mature numbering
IDETRAHLLLKEKMMRLGGRLVLNTKEELANERLMTLKIAEMKEAMRTLIFPPSMHFFQAKHLIERSQVFNILRMMPKGAALHLHDIGIVTMDWLVRNVTYRPHCHICFTPRGIMQFRFAHPTPRPSEKCSKWILLEDYRKRVQNVTEFDDSLLRNFTLVTQHPEVIYTNQNVVWSKFETIFFTISGLIHYAPVFRDYVFRSMQEFYEDNVLYMEIRAVLLPVYELSGEHHDEEWSVKTYQEVAQKFVETHPEFIGIKIIYNDHRSKDVAVIAESIRMAMGLRIKFPTVVAGFDLVGHEDTGHSLHDYKEALMIPAKDGVKLPYFFHAGETDWQGTSIDRNILDALMLNTTRIGHGFALSKHPAVRTYSWKKDIPIEVCPISNQVLKLVSDLRNHPVATLMATGHPMVISSDDPAMFGAKGLSYDFYEVFMGIGGMKADLRTLKQLAMNSIKYSTLLESEKNTFMEIWKKRWDKFIADVATK

SEQ ID NO: 805 - protein, 482 aa, synthetic construct
  REGION 1..482: note = human ADA2 R219W/S262N, mature numbering
IDETRAHLLLKEKMMRLGGRLVLNTKEELANERLMTLKIAEMKEAMRTLIFPPSMHFFQAKHLIERSQVFNILRMMPKGAALHLHDIGIVTMDWLVRNVTYRPHCHICFTPRGIMQFRFAHPTPRPSEKCSKWILLEDYRKRVQNVTEFDDSLLRNFTLVTQHPEVIYTNQNVVWSKFETIFFTISGLIHYAPVFRDYVFRSMQEFYEDNVLYMEIRAWLLPVYELSGEHHDEEWSVKTYQEVAQKFVETHPEFIGIKIIYNDHRSKDVAVIAESIRMAMGLRIKFPTVVAGFDLVGHEDTGHSLHDYKEALMIPAKDGVKLPYFFHAGETDWQGTSIDRNILDALMLNTTRIGHGFALSKHPAVRTYSWKKDIPIEVCPISNQVLKLVSDLRNHPVATLMATGHPMVISSDDPAMFGAKGLSYDFYEVFMGIGGMKADLRTLKQLAMNSIKYSTLLESEKNTFMEIWKKRWDKFIADVATK

SEQ ID NO: 806 - protein, 482 aa, synthetic construct
  REGION 1..482: note = human ADA2 R219Y/S262N, mature numbering
IDETRAHLLLKEKMMRLGGRLVLNTKEELANERLMTLKIAEMKEAMRTLIFPPSMHFFQAKHLIERSQVFNILRMMPKGAALHLHDIGIVTMDWLVRNVTYRPHCHICFTPRGIMQFRFAHPTPRPSEKCSKWILLEDYRKRVQNVTEFDDSLLRNFTLVTQHPEVIYTNQNVVWSKFETIFFTISGLIHYAPVFRDYVFRSMQEFYEDNVLYMEIRAYLLPVYELSGEHHDEEWSVKTYQEVAQKFVETHPEFIGIKIIYNDHRSKDVAVIAESIRMAMGLRIKFPTVVAGFDLVGHEDTGHSLHDYKEALMIPAKDGVKLPYFFHAGETDWQGTSIDRNILDALMLNTTRIGHGFALSKHPAVRTYSWKKDIPIEVCPISNQVLKLVSDLRNHPVATLMATGHPMVISSDDPAMFGAKGLSYDFYEVFMGIGGMKADLRTLKQLAMNSIKYSTLLESEKNTFMEIWKKRWDKFIADVATK

SEQ ID NO: 807 - protein, 482 aa, synthetic construct
  REGION 1..482: note = human ADA2 R219Q/S262N/L221C, mature numbering
IDETRAHLLLKEKMMRLGGRLVLNTKEELANERLMTLKIAEMKEAMRTLIFPPSMHFFQAKHLIERSQVFNILRMMPKGAALHLHDIGIVTMDWLVRNVTYRPHCHICFTPRGIMQFRFAHPTPRPSEKCSKWILLEDYRKRVQNVTEFDDSLLRNFTLVTQHPEVIYTNQNVVWSKFETIFFTISGLIHYAPVFRDYVFRSMQEFYEDNVLYMEIRAQLCPVYELSGEHHDEEWSVKTYQEVAQKFVETHPEFIGIKIIYNDHRSKDVAVIAESIRMAMGLRIKFPTVVAGFDLVGHEDTGHSLHDYKEALMIPAKDGVKLPYFFHAGETDWQGTSIDRNILDALMLNTTRIGHGFALSKHPAVRTYSWKKDIPIEVCPISNQVLKLVSDLRNHPVATLMATGHPMVISSDDPAMFGAKGLSYDFYEVFMGIGGMKADLRTLKQLAMNSIKYSTLLESEKNTFMEIWKKRWDKFIADVATK

SEQ ID NO: 808 - protein, 482 aa, synthetic construct
  REGION 1..482: note = human ADA2 R219Q/S262N/L221D, mature numbering
IDETRAHLLLKEKMMRLGGRLVLNTKEELANERLMTLKIAEMKEAMRTLIFPPSMHFFQAKHLIERSQVFNILRMMPKGAALHLHDIGIVTMDWLVRNVTYRPHCHICFTPRGIMQFRFAHPTPRPSEKCSKWILLEDYRKRVQNVTEFDDSLLRNFTLVTQHPEVIYTNQNVVWSKFETIFFTISGLIHYAPVFRDYVFRSMQEFYEDNVLYMEIRAQLDPVYELSGEHHDEEWSVKTYQEVAQKFVETHPEFIGIKIIYNDHRSKDVAVIAESIRMAMGLRIKFPTVVAGFDLVGHEDTGHSLHDYKEALMIPAKDGVKLPYFFHAGETDWQGTSIDRNILDALMLNTTRIGHGFALSKHPAVRTYSWKKDIPIEVCPISNQVLKLVSDLRNHPVATLMATGHPMVISSDDPAMFGAKGLSYDFYEVFMGIGGMKADLRTLKQLAMNSIKYSTLLESEKNTFMEIWKKRWDKFIADVATK

SEQ ID NO: 809 - protein, 482 aa, synthetic construct
  REGION 1..482: note = human ADA2 R219Q/S262N/L221E, mature numbering
IDETRAHLLLKEKMMRLGGRLVLNTKEELANERLMTLKIAEMKEAMRTLIFPPSMHFFQAKHLIERSQVFNILRMMPKGAALHLHDIGIVTMDWLVRNVTYRPHCHICFTPRGIMQFRFAHPTPRPSEKCSKWILLEDYRKRVQNVTEFDDSLLRNFTLVTQHPEVIYTNQNVVWSKFETIFFTISGLIHYAPVFRDYVFRSMQEFYEDNVLYMEIRAQLEPVYELSGEHHDEEWSVKTYQEVAQKFVETHPEFIGIKIIYNDHRSKDVAVIAESIRMAMGLRIKFPTVVAGFDLVGHEDTGHSLHDYKEALMIPAKDGVKLPYFFHAGETDWQGTSIDRNILDALMLNTTRIGHGFALSKHPAVRTYSWKKDIPIEVCPISNQVLKLVSDLRNHPVATLMATGHPMVISSDDPAMFGAKGLSYDFYEVFMGIGGMKADLRTLKQLAMNSIKYSTLLESEKNTFMEIWKKRWDKFIADVATK

SEQ ID NO: 810 - protein, 482 aa, synthetic construct
  REGION 1..482: note = human ADA2 R219Q/S262N/L221F, mature numbering
IDETRAHLLLKEKMMRLGGRLVLNTKEELANERLMTLKIAEMKEAMRTLIFPPSMHFFQAKHLIERSQVFNILRMMPKGAALHLHDIGIVTMDWLVRNVTYRPHCHICFTPRGIMQFRFAHPTPRPSEKCSKWILLEDYRKRVQNVTEFDDSLLRNFTLVTQHPEVIYTNQNVVWSKFETIFFTISGLIHYAPVFRDYVFRSMQEFYEDNVLYMEIRAQLFPVYELSGEHHDEEWSVKTYQEVAQKFVETHPEFIGIKIIYNDHRSKDVAVIAESIRMAMGLRIKFPTVVAGFDLVGHEDTGHSLHDYKEALMIPAKDGVKLPYFFHAGETDWQGTSIDRNILDALMLNTTRIGHGFALSKHPAVRTYSWKKDIPIEVCPISNQVLKLVSDLRNHPVATLMATGHPMVISSDDPAMFGAKGLSYDFYEVFMGIGGMKADLRTLKQLAMNSIKYSTLLESEKNTFMEIWKKRWDKFIADVATK

SEQ ID NO: 811 - protein, 482 aa, synthetic construct
  REGION 1..482: note = human ADA2 R219Q/S262N/L221H, mature numbering
IDETRAHLLLKEKMMRLGGRLVLNTKEELANERLMTLKIAEMKEAMRTLIFPPSMHFFQAKHLIERSQVFNILRMMPKGAALHLHDIGIVTMDWLVRNVTYRPHCHICFTPRGIMQFRFAHPTPRPSEKCSKWILLEDYRKRVQNVTEFDDSLLRNFTLVTQHPEVIYTNQNVVWSKFETIFFTISGLIHYAPVFRDYVFRSMQEFYEDNVLYMEIRAQLHPVYELSGEHHDEEWSVKTYQEVAQKFVETHPEFIGIKIIYNDHRSKDVAVIAESIRMAMGLRIKFPTVVAGFDLVGHEDTGHSLHDYKEALMIPAKDGVKLPYFFHAGETDWQGTSIDRNILDALMLNTTRIGHGFALSKHPAVRTYSWKKDIPIEVCPISNQVLKLVSDLRNHPVATLMATGHPMVISSDDPAMFGAKGLSYDFYEVFMGIGGMKADLRTLKQLAMNSIKYSTLLESEKNTFMEIWKKRWDKFIADVATK

SEQ ID NO: 812 - protein, 482 aa, synthetic construct
  REGION 1..482: note = human ADA2 R219Q/S262N/L221I, mature numbering
IDETRAHLLLKEKMMRLGGRLVLNTKEELANERLMTLKIAEMKEAMRTLIFPPSMHFFQAKHLIERSQVFNILRMMPKGAALHLHDIGIVTMDWLVRNVTYRPHCHICFTPRGIMQFRFAHPTPRPSEKCSKWILLEDYRKRVQNVTEFDDSLLRNFTLVTQHPEVIYTNQNVVWSKFETIFFTISGLIHYAPVFRDYVFRSMQEFYEDNVLYMEIRAQLIPVYELSGEHHDEEWSVKTYQEVAQKFVETHPEFIGIKIIYNDHRSKDVAVIAESIRMAMGLRIKFPTVVAGFDLVGHEDTGHSLHDYKEALMIPAKDGVKLPYFFHAGETDWQGTSIDRNILDALMLNTTRIGHGFALSKHPAVRTYSWKKDIPIEVCPISNQVLKLVSDLRNHPVATLMATGHPMVISSDDPAMFGAKGLSYDFYEVFMGIGGMKADLRTLKQLAMNSIKYSTLLESEKNTFMEIWKKRWDKFIADVATK

SEQ ID NO: 813 - protein, 482 aa, synthetic construct
  REGION 1..482: note = human ADA2 R219Q/S262N/L221K, mature numbering
IDETRAHLLLKEKMMRLGGRLVLNTKEELANERLMTLKIAEMKEAMRTLIFPPSMHFFQAKHLIERSQVFNILRMMPKGAALHLHDIGIVTMDWLVRNVTYRPHCHICFTPRGIMQFRFAHPTPRPSEKCSKWILLEDYRKRVQNVTEFDDSLLRNFTLVTQHPEVIYTNQNVVWSKFETIFFTISGLIHYAPVFRDYVFRSMQEFYEDNVLYMEIRAQLKPVYELSGEHHDEEWSVKTYQEVAQKFVETHPEFIGIKIIYNDHRSKDVAVIAESIRMAMGLRIKFPTVVAGFDLVGHEDTGHSLHDYKEALMIPAKDGVKLPYFFHAGETDWQGTSIDRNILDALMLNTTRIGHGFALSKHPAVRTYSWKKDIPIEVCPISNQVLKLVSDLRNHPVATLMATGHPMVISSDDPAMFGAKGLSYDFYEVFMGIGGMKADLRTLKQLAMNSIKYSTLLESEKNTFMEIWKKRWDKFIADVATK

SEQ ID NO: 814 - protein, 482 aa, synthetic construct
  REGION 1..482: note = human ADA2 R219Q/S262N/L221M, mature numbering
IDETRAHLLLKEKMMRLGGRLVLNTKEELANERLMTLKIAEMKEAMRTLIFPPSMHFFQAKHLIERSQVFNILRMMPKGAALHLHDIGIVTMDWLVRNVTYRPHCHICFTPRGIMQFRFAHPTPRPSEKCSKWILLEDYRKRVQNVTEFDDSLLRNFTLVTQHPEVIYTNQNVVWSKFETIFFTISGLIHYAPVFRDYVFRSMQEFYEDNVLYMEIRAQLMPVYELSGEHHDEEWSVKTYQEVAQKFVETHPEFIGIKIIYNDHRSKDVAVIAESIRMAMGLRIKFPTVVAGFDLVGHEDTGHSLHDYKEALMIPAKDGVKLPYFFHAGETDWQGTSIDRNILDALMLNTTRIGHGFALSKHPAVRTYSWKKDIPIEVCPISNQVLKLVSDLRNHPVATLMATGHPMVISSDDPAMFGAKGLSYDFYEVFMGIGGMKADLRTLKQLAMNSIKYSTLLESEKNTFMEIWKKRWDKFIADVATK

SEQ ID NO: 815 - protein, 482 aa, synthetic construct
  REGION 1..482: note = human ADA2 R219Q/S262N/L221N, mature numbering
IDETRAHLLLKEKMMRLGGRLVLNTKEELANERLMTLKIAEMKEAMRTLIFPPSMHFFQAKHLIERSQVFNILRMMPKGAALHLHDIGIVTMDWLVRNVTYRPHCHICFTPRGIMQFRFAHPTPRPSEKCSKWILLEDYRKRVQNVTEFDDSLLRNFTLVTQHPEVIYTNQNVVWSKFETIFFTISGLIHYAPVFRDYVFRSMQEFYEDNVLYMEIRAQLNPVYELSGEHHDEEWSVKTYQEVAQKFVETHPEFIGIKIIYNDHRSKDVAVIAESIRMAMGLRIKFPTVVAGFDLVGHEDTGHSLHDYKEALMIPAKDGVKLPYFFHAGETDWQGTSIDRNILDALMLNTTRIGHGFALSKHPAVRTYSWKKDIPIEVCPISNQVLKLVSDLRNHPVATLMATGHPMVISSDDPAMFGAKGLSYDFYEVFMGIGGMKADLRTLKQLAMNSIKYSTLLESEKNTFMEIWKKRWDKFIADVATK

SEQ ID NO: 816 - protein, 482 aa, synthetic construct
  REGION 1..482: note = human ADA2 R219Q/S262N/L221P, mature numbering
IDETRAHLLLKEKMMRLGGRLVLNTKEELANERLMTLKIAEMKEAMRTLIFPPSMHFFQAKHLIERSQVFNILRMMPKGAALHLHDIGIVTMDWLVRNVTYRPHCHICFTPRGIMQFRFAHPTPRPSEKCSKWILLEDYRKRVQNVTEFDDSLLRNFTLVTQHPEVIYTNQNVVWSKFETIFFTISGLIHYAPVFRDYVFRSMQEFYEDNVLYMEIRAQLPPVYELSGEHHDEEWSVKTYQEVAQKFVETHPEFIGIKIIYNDHRSKDVAVIAESIRMAMGLRIKFPTVVAGFDLVGHEDTGHSLHDYKEALMIPAKDGVKLPYFFHAGETDWQGTSIDRNILDALMLNTTRIGHGFALSKHPAVRTYSWKKDIPIEVCPISNQVLKLVSDLRNHPVATLMATGHPMVISSDDPAMFGAKGLSYDFYEVFMGIGGMKADLRTLKQLAMNSIKYSTLLESEKNTFMEIWKKRWDKFIADVATK

SEQ ID NO: 817 - protein, 482 aa, synthetic construct
  REGION 1..482: note = human ADA2 R219Q/S262N/L221Q, mature numbering
IDETRAHLLLKEKMMRLGGRLVLNTKEELANERLMTLKIAEMKEAMRTLIFPPSMHFFQAKHLIERSQVFNILRMMPKGAALHLHDIGIVTMDWLVRNVTYRPHCHICFTPRGIMQFRFAHPTPRPSEKCSKWILLEDYRKRVQNVTEFDDSLLRNFTLVTQHPEVIYTNQNVVWSKFETIFFTISGLIHYAPVFRDYVFRSMQEFYEDNVLYMEIRAQLQPVYELSGEHHDEEWSVKTYQEVAQKFVETHPEFIGIKIIYNDHRSKDVAVIAESIRMAMGLRIKFPTVVAGFDLVGHEDTGHSLHDYKEALMIPAKDGVKLPYFFHAGETDWQGTSIDRNILDALMLNTTRIGHGFALSKHPAVRTYSWKKDIPIEVCPISNQVLKLVSDLRNHPVATLMATGHPMVISSDDPAMFGAKGLSYDFYEVFMGIGGMKADLRTLKQLAMNSIKYSTLLESEKNTFMEIWKKRWDKFIADVATK

SEQ ID NO: 818 - protein, 482 aa, synthetic construct
  REGION 1..482: note = human ADA2 R219Q/S262N/L221R, mature numbering
IDETRAHLLLKEKMMRLGGRLVLNTKEELANERLMTLKIAEMKEAMRTLIFPPSMHFFQAKHLIERSQVFNILRMMPKGAALHLHDIGIVTMDWLVRNVTYRPHCHICFTPRGIMQFRFAHPTPRPSEKCSKWILLEDYRKRVQNVTEFDDSLLRNFTLVTQHPEVIYTNQNVVWSKFETIFFTISGLIHYAPVFRDYVFRSMQEFYEDNVLYMEIRAQLRPVYELSGEHHDEEWSVKTYQEVAQKFVETHPEFIGIKIIYNDHRSKDVAVIAESIRMAMGLRIKFPTVVAGFDLVGHEDTGHSLHDYKEALMIPAKDGVKLPYFFHAGETDWQGTSIDRNILDALMLNTTRIGHGFALSKHPAVRTYSWKKDIPIEVCPISNQVLKLVSDLRNHPVATLMATGHPMVISSDDPAMFGAKGLSYDFYEVFMGIGGMKADLRTLKQLAMNSIKYSTLLESEKNTFMEIWKKRWDKFIADVATK

SEQ ID NO: 819 - protein, 482 aa, synthetic construct
  REGION 1..482: note = human ADA2 R219Q/S262N/L221S, mature numbering
IDETRAHLLLKEKMMRLGGRLVLNTKEELANERLMTLKIAEMKEAMRTLIFPPSMHFFQAKHLIERSQVFNILRMMPKGAALHLHDIGIVTMDWLVRNVTYRPHCHICFTPRGIMQFRFAHPTPRPSEKCSKWILLEDYRKRVQNVTEFDDSLLRNFTLVTQHPEVIYTNQNVVWSKFETIFFTISGLIHYAPVFRDYVFRSMQEFYEDNVLYMEIRAQLSPVYELSGEHHDEEWSVKTYQEVAQKFVETHPEFIGIKIIYNDHRSKDVAVIAESIRMAMGLRIKFPTVVAGFDLVGHEDTGHSLHDYKEALMIPAKDGVKLPYFFHAGETDWQGTSIDRNILDALMLNTTRIGHGFALSKHPAVRTYSWKKDIPIEVCPISNQVLKLVSDLRNHPVATLMATGHPMVISSDDPAMFGAKGLSYDFYEVFMGIGGMKADLRTLKQLAMNSIKYSTLLESEKNTFMEIWKKRWDKFIADVATK

SEQ ID NO: 820 - protein, 482 aa, synthetic construct
  REGION 1..482: note = human ADA2 R219Q/S262N/L221T, mature numbering
IDETRAHLLLKEKMMRLGGRLVLNTKEELANERLMTLKIAEMKEAMRTLIFPPSMHFFQAKHLIERSQVFNILRMMPKGAALHLHDIGIVTMDWLVRNVTYRPHCHICFTPRGIMQFRFAHPTPRPSEKCSKWILLEDYRKRVQNVTEFDDSLLRNFTLVTQHPEVIYTNQNVVWSKFETIFFTISGLIHYAPVFRDYVFRSMQEFYEDNVLYMEIRAQLTPVYELSGEHHDEEWSVKTYQEVAQKFVETHPEFIGIKIIYNDHRSKDVAVIAESIRMAMGLRIKFPTVVAGFDLVGHEDTGHSLHDYKEALMIPAKDGVKLPYFFHAGETDWQGTSIDRNILDALMLNTTRIGHGFALSKHPAVRTYSWKKDIPIEVCPISNQVLKLVSDLRNHPVATLMATGHPMVISSDDPAMFGAKGLSYDFYEVFMGIGGMKADLRTLKQLAMNSIKYSTLLESEKNTFMEIWKKRWDKFIADVATK

SEQ ID NO: 821 - protein, 482 aa, synthetic construct
  REGION 1..482: note = human ADA2 R219Q/S262N/L221W, mature numbering
IDETRAHLLLKEKMMRLGGRLVLNTKEELANERLMTLKIAEMKEAMRTLIFPPSMHFFQAKHLIERSQVFNILRMMPKGAALHLHDIGIVTMDWLVRNVTYRPHCHICFTPRGIMQFRFAHPTPRPSEKCSKWILLEDYRKRVQNVTEFDDSLLRNFTLVTQHPEVIYTNQNVVWSKFETIFFTISGLIHYAPVFRDYVFRSMQEFYEDNVLYMEIRAQLWPVYELSGEHHDEEWSVKTYQEVAQKFVETHPEFIGIKIIYNDHRSKDVAVIAESIRMAMGLRIKFPTVVAGFDLVGHEDTGHSLHDYKEALMIPAKDGVKLPYFFHAGETDWQGTSIDRNILDALMLNTTRIGHGFALSKHPAVRTYSWKKDIPIEVCPISNQVLKLVSDLRNHPVATLMATGHPMVISSDDPAMFGAKGLSYDFYEVFMGIGGMKADLRTLKQLAMNSIKYSTLLESEKNTFMEIWKKRWDKFIADVATK

SEQ ID NO: 822 - protein, 482 aa, synthetic construct
  REGION 1..482: note = human ADA2 R219Q/S262N/L221Y, mature numbering
IDETRAHLLLKEKMMRLGGRLVLNTKEELANERLMTLKIAEMKEAMRTLIFPPSMHFFQAKHLIERSQVFNILRMMPKGAALHLHDIGIVTMDWLVRNVTYRPHCHICFTPRGIMQFRFAHPTPRPSEKCSKWILLEDYRKRVQNVTEFDDSLLRNFTLVTQHPEVIYTNQNVVWSKFETIFFTISGLIHYAPVFRDYVFRSMQEFYEDNVLYMEIRAQLYPVYELSGEHHDEEWSVKTYQEVAQKFVETHPEFIGIKIIYNDHRSKDVAVIAESIRMAMGLRIKFPTVVAGFDLVGHEDTGHSLHDYKEALMIPAKDGVKLPYFFHAGETDWQGTSIDRNILDALMLNTTRIGHGFALSKHPAVRTYSWKKDIPIEVCPISNQVLKLVSDLRNHPVATLMATGHPMVISSDDPAMFGAKGLSYDFYEVFMGIGGMKADLRTLKQLAMNSIKYSTLLESEKNTFMEIWKKRWDKFIADVATK

SEQ ID NO: 823 - protein, 482 aa, synthetic construct
  REGION 1..482: note = human ADA2 R219Q/S262C, mature numbering
IDETRAHLLLKEKMMRLGGRLVLNTKEELANERLMTLKIAEMKEAMRTLIFPPSMHFFQAKHLIERSQVFNILRMMPKGAALHLHDIGIVTMDWLVRNVTYRPHCHICFTPRGIMQFRFAHPTPRPSEKCSKWILLEDYRKRVQNVTEFDDSLLRNFTLVTQHPEVIYTNQNVVWSKFETIFFTISGLIHYAPVFRDYVFRSMQEFYEDNVLYMEIRAQLLPVYELSGEHHDEEWSVKTYQEVAQKFVETHPEFIGIKIIYCDHRSKDVAVIAESIRMAMGLRIKFPTVVAGFDLVGHEDTGHSLHDYKEALMIPAKDGVKLPYFFHAGETDWQGTSIDRNILDALMLNTTRIGHGFALSKHPAVRTYSWKKDIPIEVCPISNQVLKLVSDLRNHPVATLMATGHPMVISSDDPAMFGAKGLSYDFYEVFMGIGGMKADLRTLKQLAMNSIKYSTLLESEKNTFMEIWKKRWDKFIADVATK

SEQ ID NO: 824 - protein, 482 aa, synthetic construct
  REGION 1..482: note = human ADA2 R219Q/S262D, mature numbering
IDETRAHLLLKEKMMRLGGRLVLNTKEELANERLMTLKIAEMKEAMRTLIFPPSMHFFQAKHLIERSQVFNILRMMPKGAALHLHDIGIVTMDWLVRNVTYRPHCHICFTPRGIMQFRFAHPTPRPSEKCSKWILLEDYRKRVQNVTEFDDSLLRNFTLVTQHPEVIYTNQNVVWSKFETIFFTISGLIHYAPVFRDYVFRSMQEFYEDNVLYMEIRAQLLPVYELSGEHHDEEWSVKTYQEVAQKFVETHPEFIGIKIIYDDHRSKDVAVIAESIRMAMGLRIKFPTVVAGFDLVGHEDTGHSLHDYKEALMIPAKDGVKLPYFFHAGETDWQGTSIDRNILDALMLNTTRIGHGFALSKHPAVRTYSWKKDIPIEVCPISNQVLKLVSDLRNHPVATLMATGHPMVISSDDPAMFGAKGLSYDFYEVFMGIGGMKADLRTLKQLAMNSIKYSTLLESEKNTFMEIWKKRWDKFIADVATK

SEQ ID NO: 825 - protein, 482 aa, synthetic construct
  REGION 1..482: note = human ADA2 R219Q/S262E, mature numbering
IDETRAHLLLKEKMMRLGGRLVLNTKEELANERLMTLKIAEMKEAMRTLIFPPSMHFFQAKHLIERSQVFNILRMMPKGAALHLHDIGIVTMDWLVRNVTYRPHCHICFTPRGIMQFRFAHPTPRPSEKCSKWILLEDYRKRVQNVTEFDDSLLRNFTLVTQHPEVIYTNQNVVWSKFETIFFTISGLIHYAPVFRDYVFRSMQEFYEDNVLYMEIRAQLLPVYELSGEHHDEEWSVKTYQEVAQKFVETHPEFIGIKIIYEDHRSKDVAVIAESIRMAMGLRIKFPTVVAGFDLVGHEDTGHSLHDYKEALMIPAKDGVKLPYFFHAGETDWQGTSIDRNILDALMLNTTRIGHGFALSKHPAVRTYSWKKDIPIEVCPISNQVLKLVSDLRNHPVATLMATGHPMVISSDDPAMFGAKGLSYDFYEVFMGIGGMKADLRTLKQLAMNSIKYSTLLESEKNTFMEIWKKRWDKFIADVATK

SEQ ID NO: 826 - protein, 482 aa, synthetic construct
  REGION 1..482: note = human ADA2 R219Q/S262F, mature numbering
IDETRAHLLLKEKMMRLGGRLVLNTKEELANERLMTLKIAEMKEAMRTLIFPPSMHFFQAKHLIERSQVFNILRMMPKGAALHLHDIGIVTMDWLVRNVTYRPHCHICFTPRGIMQFRFAHPTPRPSEKCSKWILLEDYRKRVQNVTEFDDSLLRNFTLVTQHPEVIYTNQNVVWSKFETIFFTISGLIHYAPVFRDYVFRSMQEFYEDNVLYMEIRAQLLPVYELSGEHHDEEWSVKTYQEVAQKFVETHPEFIGIKIIYFDHRSKDVAVIAESIRMAMGLRIKFPTVVAGFDLVGHEDTGHSLHDYKEALMIPAKDGVKLPYFFHAGETDWQGTSIDRNILDALMLNTTRIGHGFALSKHPAVRTYSWKKDIPIEVCPISNQVLKLVSDLRNHPVATLMATGHPMVISSDDPAMFGAKGLSYDFYEVFMGIGGMKADLRTLKQLAMNSIKYSTLLESEKNTFMEIWKKRWDKFIADVATK

SEQ ID NO: 827 - protein, 482 aa, synthetic construct
  REGION 1..482: note = human ADA2 R219Q/S262G, mature numbering
IDETRAHLLLKEKMMRLGGRLVLNTKEELANERLMTLKIAEMKEAMRTLIFPPSMHFFQAKHLIERSQVFNILRMMPKGAALHLHDIGIVTMDWLVRNVTYRPHCHICFTPRGIMQFRFAHPTPRPSEKCSKWILLEDYRKRVQNVTEFDDSLLRNFTLVTQHPEVIYTNQNVVWSKFETIFFTISGLIHYAPVFRDYVFRSMQEFYEDNVLYMEIRAQLLPVYELSGEHHDEEWSVKTYQEVAQKFVETHPEFIGIKIIYGDHRSKDVAVIAESIRMAMGLRIKFPTVVAGFDLVGHEDTGHSLHDYKEALMIPAKDGVKLPYFFHAGETDWQGTSIDRNILDALMLNTTRIGHGFALSKHPAVRTYSWKKDIPIEVCPISNQVLKLVSDLRNHPVATLMATGHPMVISSDDPAMFGAKGLSYDFYEVFMGIGGMKADLRTLKQLAMNSIKYSTLLESEKNTFMEIWKKRWDKFIADVATK

SEQ ID NO: 828 - protein, 482 aa, synthetic construct
  REGION 1..482: note = human ADA2 R219Q/S262H, mature numbering
IDETRAHLLLKEKMMRLGGRLVLNTKEELANERLMTLKIAEMKEAMRTLIFPPSMHFFQAKHLIERSQVFNILRMMPKGAALHLHDIGIVTMDWLVRNVTYRPHCHICFTPRGIMQFRFAHPTPRPSEKCSKWILLEDYRKRVQNVTEFDDSLLRNFTLVTQHPEVIYTNQNVVWSKFETIFFTISGLIHYAPVFRDYVFRSMQEFYEDNVLYMEIRAQLLPVYELSGEHHDEEWSVKTYQEVAQKFVETHPEFIGIKIIYHDHRSKDVAVIAESIRMAMGLRIKFPTVVAGFDLVGHEDTGHSLHDYKEALMIPAKDGVKLPYFFHAGETDWQGTSIDRNILDALMLNTTRIGHGFALSKHPAVRTYSWKKDIPIEVCPISNQVLKLVSDLRNHPVATLMATGHPMVISSDDPAMFGAKGLSYDFYEVFMGIGGMKADLRTLKQLAMNSIKYSTLLESEKNTFMEIWKKRWDKFIADVATK

SEQ ID NO: 829 - protein, 482 aa, synthetic construct
  REGION 1..482: note = human ADA2 R219Q/S262I, mature numbering
IDETRAHLLLKEKMMRLGGRLVLNTKEELANERLMTLKIAEMKEAMRTLIFPPSMHFFQAKHLIERSQVFNILRMMPKGAALHLHDIGIVTMDWLVRNVTYRPHCHICFTPRGIMQFRFAHPTPRPSEKCSKWILLEDYRKRVQNVTEFDDSLLRNFTLVTQHPEVIYTNQNVVWSKFETIFFTISGLIHYAPVFRDYVFRSMQEFYEDNVLYMEIRAQLLPVYELSGEHHDEEWSVKTYQEVAQKFVETHPEFIGIKIIYIDHRSKDVAVIAESIRMAMGLRIKFPTVVAGFDLVGHEDTGHSLHDYKEALMIPAKDGVKLPYFFHAGETDWQGTSIDRNILDALMLNTTRIGHGFALSKHPAVRTYSWKKDIPIEVCPISNQVLKLVSDLRNHPVATLMATGHPMVISSDDPAMFGAKGLSYDFYEVFMGIGGMKADLRTLKQLAMNSIKYSTLLESEKNTFMEIWKKRWDKFIADVATK

SEQ ID NO: 830 - protein, 482 aa, synthetic construct
  REGION 1..482: note = human ADA2 R219Q/S262K, mature numbering
IDETRAHLLLKEKMMRLGGRLVLNTKEELANERLMTLKIAEMKEAMRTLIFPPSMHFFQAKHLIERSQVFNILRMMPKGAALHLHDIGIVTMDWLVRNVTYRPHCHICFTPRGIMQFRFAHPTPRPSEKCSKWILLEDYRKRVQNVTEFDDSLLRNFTLVTQHPEVIYTNQNVVWSKFETIFFTISGLIHYAPVFRDYVFRSMQEFYEDNVLYMEIRAQLLPVYELSGEHHDEEWSVKTYQEVAQKFVETHPEFIGIKIIYKDHRSKDVAVIAESIRMAMGLRIKFPTVVAGFDLVGHEDTGHSLHDYKEALMIPAKDGVKLPYFFHAGETDWQGTSIDRNILDALMLNTTRIGHGFALSKHPAVRTYSWKKDIPIEVCPISNQVLKLVSDLRNHPVATLMATGHPMVISSDDPAMFGAKGLSYDFYEVFMGIGGMKADLRTLKQLAMNSIKYSTLLESEKNTFMEIWKKRWDKFIADVATK

SEQ ID NO: 831 - protein, 482 aa, synthetic construct
  REGION 1..482: note = human ADA2 R219Q/S262L, mature numbering
IDETRAHLLLKEKMMRLGGRLVLNTKEELANERLMTLKIAEMKEAMRTLIFPPSMHFFQAKHLIERSQVFNILRMMPKGAALHLHDIGIVTMDWLVRNVTYRPHCHICFTPRGIMQFRFAHPTPRPSEKCSKWILLEDYRKRVQNVTEFDDSLLRNFTLVTQHPEVIYTNQNVVWSKFETIFFTISGLIHYAPVFRDYVFRSMQEFYEDNVLYMEIRAQLLPVYELSGEHHDEEWSVKTYQEVAQKFVETHPEFIGIKIIYLDHRSKDVAVIAESIRMAMGLRIKFPTVVAGFDLVGHEDTGHSLHDYKEALMIPAKDGVKLPYFFHAGETDWQGTSIDRNILDALMLNTTRIGHGFALSKHPAVRTYSWKKDIPIEVCPISNQVLKLVSDLRNHPVATLMATGHPMVISSDDPAMFGAKGLSYDFYEVFMGIGGMKADLRTLKQLAMNSIKYSTLLESEKNTFMEIWKKRWDKFIADVATK

SEQ ID NO: 832 - protein, 482 aa, synthetic construct
  REGION 1..482: note = human ADA2 R219Q/S262P, mature numbering
IDETRAHLLLKEKMMRLGGRLVLNTKEELANERLMTLKIAEMKEAMRTLIFPPSMHFFQAKHLIERSQVFNILRMMPKGAALHLHDIGIVTMDWLVRNVTYRPHCHICFTPRGIMQFRFAHPTPRPSEKCSKWILLEDYRKRVQNVTEFDDSLLRNFTLVTQHPEVIYTNQNVVWSKFETIFFTISGLIHYAPVFRDYVFRSMQEFYEDNVLYMEIRAQLLPVYELSGEHHDEEWSVKTYQEVAQKFVETHPEFIGIKIIYPDHRSKDVAVIAESIRMAMGLRIKFPTVVAGFDLVGHEDTGHSLHDYKEALMIPAKDGVKLPYFFHAGETDWQGTSIDRNILDALMLNTTRIGHGFALSKHPAVRTYSWKKDIPIEVCPISNQVLKLVSDLRNHPVATLMATGHPMVISSDDPAMFGAKGLSYDFYEVFMGIGGMKADLRTLKQLAMNSIKYSTLLESEKNTFMEIWKKRWDKFIADVATK

SEQ ID NO: 833 - protein, 482 aa, synthetic construct
  REGION 1..482: note = human ADA2 R219Q/S262Q, mature numbering
IDETRAHLLLKEKMMRLGGRLVLNTKEELANERLMTLKIAEMKEAMRTLIFPPSMHFFQAKHLIERSQVFNILRMMPKGAALHLHDIGIVTMDWLVRNVTYRPHCHICFTPRGIMQFRFAHPTPRPSEKCSKWILLEDYRKRVQNVTEFDDSLLRNFTLVTQHPEVIYTNQNVVWSKFETIFFTISGLIHYAPVFRDYVFRSMQEFYEDNVLYMEIRAQLLPVYELSGEHHDEEWSVKTYQEVAQKFVETHPEFIGIKIIYQDHRSKDVAVIAESIRMAMGLRIKFPTVVAGFDLVGHEDTGHSLHDYKEALMIPAKDGVKLPYFFHAGETDWQGTSIDRNILDALMLNTTRIGHGFALSKHPAVRTYSWKKDIPIEVCPISNQVLKLVSDLRNHPVATLMATGHPMVISSDDPAMFGAKGLSYDFYEVFMGIGGMKADLRTLKQLAMNSIKYSTLLESEKNTFMEIWKKRWDKFIADVATK

SEQ ID NO: 834 - protein, 482 aa, synthetic construct
  REGION 1..482: note = human ADA2 R219Q/S262R, mature numbering
IDETRAHLLLKEKMMRLGGRLVLNTKEELANERLMTLKIAEMKEAMRTLIFPPSMHFFQAKHLIERSQVFNILRMMPKGAALHLHDIGIVTMDWLVRNVTYRPHCHICFTPRGIMQFRFAHPTPRPSEKCSKWILLEDYRKRVQNVTEFDDSLLRNFTLVTQHPEVIYTNQNVVWSKFETIFFTISGLIHYAPVFRDYVFRSMQEFYEDNVLYMEIRAQLLPVYELSGEHHDEEWSVKTYQEVAQKFVETHPEFIGIKIIYRDHRSKDVAVIAESIRMAMGLRIKFPTVVAGFDLVGHEDTGHSLHDYKEALMIPAKDGVKLPYFFHAGETDWQGTSIDRNILDALMLNTTRIGHGFALSKHPAVRTYSWKKDIPIEVCPISNQVLKLVSDLRNHPVATLMATGHPMVISSDDPAMFGAKGLSYDFYEVFMGIGGMKADLRTLKQLAMNSIKYSTLLESEKNTFMEIWKKRWDKFIADVATK

SEQ ID NO: 835 - protein, 482 aa, synthetic construct
  REGION 1..482: note = human ADA2 R219Q/S262T, mature numbering
IDETRAHLLLKEKMMRLGGRLVLNTKEELANERLMTLKIAEMKEAMRTLIFPPSMHFFQAKHLIERSQVFNILRMMPKGAALHLHDIGIVTMDWLVRNVTYRPHCHICFTPRGIMQFRFAHPTPRPSEKCSKWILLEDYRKRVQNVTEFDDSLLRNFTLVTQHPEVIYTNQNVVWSKFETIFFTISGLIHYAPVFRDYVFRSMQEFYEDNVLYMEIRAQLLPVYELSGEHHDEEWSVKTYQEVAQKFVETHPEFIGIKIIYTDHRSKDVAVIAESIRMAMGLRIKFPTVVAGFDLVGHEDTGHSLHDYKEALMIPAKDGVKLPYFFHAGETDWQGTSIDRNILDALMLNTTRIGHGFALSKHPAVRTYSWKKDIPIEVCPISNQVLKLVSDLRNHPVATLMATGHPMVISSDDPAMFGAKGLSYDFYEVFMGIGGMKADLRTLKQLAMNSIKYSTLLESEKNTFMEIWKKRWDKFIADVATK

SEQ ID NO: 836 - protein, 482 aa, synthetic construct
  REGION 1..482: note = human ADA2 R219Q/S262W, mature numbering
IDETRAHLLLKEKMMRLGGRLVLNTKEELANERLMTLKIAEMKEAMRTLIFPPSMHFFQAKHLIERSQVFNILRMMPKGAALHLHDIGIVTMDWLVRNVTYRPHCHICFTPRGIMQFRFAHPTPRPSEKCSKWILLEDYRKRVQNVTEFDDSLLRNFTLVTQHPEVIYTNQNVVWSKFETIFFTISGLIHYAPVFRDYVFRSMQEFYEDNVLYMEIRAQLLPVYELSGEHHDEEWSVKTYQEVAQKFVETHPEFIGIKIIYWDHRSKDVAVIAESIRMAMGLRIKFPTVVAGFDLVGHEDTGHSLHDYKEALMIPAKDGVKLPYFFHAGETDWQGTSIDRNILDALMLNTTRIGHGFALSKHPAVRTYSWKKDIPIEVCPISNQVLKLVSDLRNHPVATLMATGHPMVISSDDPAMFGAKGLSYDFYEVFMGIGGMKADLRTLKQLAMNSIKYSTLLESEKNTFMEIWKKRWDKFIADVATK

SEQ ID NO: 837 - protein, 482 aa, synthetic construct
  REGION 1..482: note = human ADA2 R219Q/S262Y, mature numbering
IDETRAHLLLKEKMMRLGGRLVLNTKEELANERLMTLKIAEMKEAMRTLIFPPSMHFFQAKHLIERSQVFNILRMMPKGAALHLHDIGIVTMDWLVRNVTYRPHCHICFTPRGIMQFRFAHPTPRPSEKCSKWILLEDYRKRVQNVTEFDDSLLRNFTLVTQHPEVIYTNQNVVWSKFETIFFTISGLIHYAPVFRDYVFRSMQEFYEDNVLYMEIRAQLLPVYELSGEHHDEEWSVKTYQEVAQKFVETHPEFIGIKIIYYDHRSKDVAVIAESIRMAMGLRIKFPTVVAGFDLVGHEDTGHSLHDYKEALMIPAKDGVKLPYFFHAGETDWQGTSIDRNILDALMLNTTRIGHGFALSKHPAVRTYSWKKDIPIEVCPISNQVLKLVSDLRNHPVATLMATGHPMVISSDDPAMFGAKGLSYDFYEVFMGIGGMKADLRTLKQLAMNSIKYSTLLESEKNTFMEIWKKRWDKFIADVATK

SEQ ID NO: 838 - protein, 482 aa, synthetic construct
  REGION 1..482: note = human ADA2 R219Q/S262N/H264C, mature numbering
IDETRAHLLLKEKMMRLGGRLVLNTKEELANERLMTLKIAEMKEAMRTLIFPPSMHFFQAKHLIERSQVFNILRMMPKGAALHLHDIGIVTMDWLVRNVTYRPHCHICFTPRGIMQFRFAHPTPRPSEKCSKWILLEDYRKRVQNVTEFDDSLLRNFTLVTQHPEVIYTNQNVVWSKFETIFFTISGLIHYAPVFRDYVFRSMQEFYEDNVLYMEIRAQLLPVYELSGEHHDEEWSVKTYQEVAQKFVETHPEFIGIKIIYNDCRSKDVAVIAESIRMAMGLRIKFPTVVAGFDLVGHEDTGHSLHDYKEALMIPAKDGVKLPYFFHAGETDWQGTSIDRNILDALMLNTTRIGHGFALSKHPAVRTYSWKKDIPIEVCPISNQVLKLVSDLRNHPVATLMATGHPMVISSDDPAMFGAKGLSYDFYEVFMGIGGMKADLRTLKQLAMNSIKYSTLLESEKNTFMEIWKKRWDKFIADVATK

SEQ ID NO: 839 - protein, 482 aa, synthetic construct
  REGION 1..482: note = human ADA2 R219Q/S262N/H264D, mature numbering
IDETRAHLLLKEKMMRLGGRLVLNTKEELANERLMTLKIAEMKEAMRTLIFPPSMHFFQAKHLIERSQVFNILRMMPKGAALHLHDIGIVTMDWLVRNVTYRPHCHICFTPRGIMQFRFAHPTPRPSEKCSKWILLEDYRKRVQNVTEFDDSLLRNFTLVTQHPEVIYTNQNVVWSKFETIFFTISGLIHYAPVFRDYVFRSMQEFYEDNVLYMEIRAQLLPVYELSGEHHDEEWSVKTYQEVAQKFVETHPEFIGIKIIYNDDRSKDVAVIAESIRMAMGLRIKFPTVVAGFDLVGHEDTGHSLHDYKEALMIPAKDGVKLPYFFHAGETDWQGTSIDRNILDALMLNTTRIGHGFALSKHPAVRTYSWKKDIPIEVCPISNQVLKLVSDLRNHPVATLMATGHPMVISSDDPAMFGAKGLSYDFYEVFMGIGGMKADLRTLKQLAMNSIKYSTLLESEKNTFMEIWKKRWDKFIADVATK

SEQ ID NO: 840 - protein, 482 aa, synthetic construct
  REGION 1..482: note = human ADA2 R219Q/S262N/H264E, mature numbering
IDETRAHLLLKEKMMRLGGRLVLNTKEELANERLMTLKIAEMKEAMRTLIFPPSMHFFQAKHLIERSQVFNILRMMPKGAALHLHDIGIVTMDWLVRNVTYRPHCHICFTPRGIMQFRFAHPTPRPSEKCSKWILLEDYRKRVQNVTEFDDSLLRNFTLVTQHPEVIYTNQNVVWSKFETIFFTISGLIHYAPVFRDYVFRSMQEFYEDNVLYMEIRAQLLPVYELSGEHHDEEWSVKTYQEVAQKFVETHPEFIGIKIIYNDERSKDVAVIAESIRMAMGLRIKFPTVVAGFDLVGHEDTGHSLHDYKEALMIPAKDGVKLPYFFHAGETDWQGTSIDRNILDALMLNTTRIGHGFALSKHPAVRTYSWKKDIPIEVCPISNQVLKLVSDLRNHPVATLMATGHPMVISSDDPAMFGAKGLSYDFYEVFMGIGGMKADLRTLKQLAMNSIKYSTLLESEKNTFMEIWKKRWDKFIADVATK

SEQ ID NO: 841 - protein, 482 aa, synthetic construct
  REGION 1..482: note = human ADA2 R219Q/S262N/H264F, mature numbering
IDETRAHLLLKEKMMRLGGRLVLNTKEELANERLMTLKIAEMKEAMRTLIFPPSMHFFQAKHLIERSQVFNILRMMPKGAALHLHDIGIVTMDWLVRNVTYRPHCHICFTPRGIMQFRFAHPTPRPSEKCSKWILLEDYRKRVQNVTEFDDSLLRNFTLVTQHPEVIYTNQNVVWSKFETIFFTISGLIHYAPVFRDYVFRSMQEFYEDNVLYMEIRAQLLPVYELSGEHHDEEWSVKTYQEVAQKFVETHPEFIGIKIIYNDFRSKDVAVIAESIRMAMGLRIKFPTVVAGFDLVGHEDTGHSLHDYKEALMIPAKDGVKLPYFFHAGETDWQGTSIDRNILDALMLNTTRIGHGFALSKHPAVRTYSWKKDIPIEVCPISNQVLKLVSDLRNHPVATLMATGHPMVISSDDPAMFGAKGLSYDFYEVFMGIGGMKADLRTLKQLAMNSIKYSTLLESEKNTFMEIWKKRWDKFIADVATK

SEQ ID NO: 842 - protein, 482 aa, synthetic construct
  REGION 1..482: note = human ADA2 R219Q/S262N/H264I, mature numbering
IDETRAHLLLKEKMMRLGGRLVLNTKEELANERLMTLKIAEMKEAMRTLIFPPSMHFFQAKHLIERSQVFNILRMMPKGAALHLHDIGIVTMDWLVRNVTYRPHCHICFTPRGIMQFRFAHPTPRPSEKCSKWILLEDYRKRVQNVTEFDDSLLRNFTLVTQHPEVIYTNQNVVWSKFETIFFTISGLIHYAPVFRDYVFRSMQEFYEDNVLYMEIRAQLLPVYELSGEHHDEEWSVKTYQEVAQKFVETHPEFIGIKIIYNDIRSKDVAVIAESIRMAMGLRIKFPTVVAGFDLVGHEDTGHSLHDYKEALMIPAKDGVKLPYFFHAGETDWQGTSIDRNILDALMLNTTRIGHGFALSKHPAVRTYSWKKDIPIEVCPISNQVLKLVSDLRNHPVATLMATGHPMVISSDDPAMFGAKGLSYDFYEVFMGIGGMKADLRTLKQLAMNSIKYSTLLESEKNTFMEIWKKRWDKFIADVATK

SEQ ID NO: 843 - protein, 482 aa, synthetic construct
  REGION 1..482: note = human ADA2 R219Q/S262N/H264K, mature numbering
IDETRAHLLLKEKMMRLGGRLVLNTKEELANERLMTLKIAEMKEAMRTLIFPPSMHFFQAKHLIERSQVFNILRMMPKGAALHLHDIGIVTMDWLVRNVTYRPHCHICFTPRGIMQFRFAHPTPRPSEKCSKWILLEDYRKRVQNVTEFDDSLLRNFTLVTQHPEVIYTNQNVVWSKFETIFFTISGLIHYAPVFRDYVFRSMQEFYEDNVLYMEIRAQLLPVYELSGEHHDEEWSVKTYQEVAQKFVETHPEFIGIKIIYNDKRSKDVAVIAESIRMAMGLRIKFPTVVAGFDLVGHEDTGHSLHDYKEALMIPAKDGVKLPYFFHAGETDWQGTSIDRNILDALMLNTTRIGHGFALSKHPAVRTYSWKKDIPIEVCPISNQVLKLVSDLRNHPVATLMATGHPMVISSDDPAMFGAKGLSYDFYEVFMGIGGMKADLRTLKQLAMNSIKYSTLLESEKNTFMEIWKKRWDKFIADVATK

SEQ ID NO: 844 - protein, 482 aa, synthetic construct
  REGION 1..482: note = human ADA2 R219Q/S262N/H264L, mature numbering
IDETRAHLLLKEKMMRLGGRLVLNTKEELANERLMTLKIAEMKEAMRTLIFPPSMHFFQAKHLIERSQVFNILRMMPKGAALHLHDIGIVTMDWLVRNVTYRPHCHICFTPRGIMQFRFAHPTPRPSEKCSKWILLEDYRKRVQNVTEFDDSLLRNFTLVTQHPEVIYTNQNVVWSKFETIFFTISGLIHYAPVFRDYVFRSMQEFYEDNVLYMEIRAQLLPVYELSGEHHDEEWSVKTYQEVAQKFVETHPEFIGIKIIYNDLRSKDVAVIAESIRMAMGLRIKFPTVVAGFDLVGHEDTGHSLHDYKEALMIPAKDGVKLPYFFHAGETDWQGTSIDRNILDALMLNTTRIGHGFALSKHPAVRTYSWKKDIPIEVCPISNQVLKLVSDLRNHPVATLMATGHPMVISSDDPAMFGAKGLSYDFYEVFMGIGGMKADLRTLKQLAMNSIKYSTLLESEKNTFMEIWKKRWDKFIADVATK

SEQ ID NO: 845 - protein, 482 aa, synthetic construct
  REGION 1..482: note = human ADA2 R219Q/S262N/H264M, mature numbering
IDETRAHLLLKEKMMRLGGRLVLNTKEELANERLMTLKIAEMKEAMRTLIFPPSMHFFQAKHLIERSQVFNILRMMPKGAALHLHDIGIVTMDWLVRNVTYRPHCHICFTPRGIMQFRFAHPTPRPSEKCSKWILLEDYRKRVQNVTEFDDSLLRNFTLVTQHPEVIYTNQNVVWSKFETIFFTISGLIHYAPVFRDYVFRSMQEFYEDNVLYMEIRAQLLPVYELSGEHHDEEWSVKTYQEVAQKFVETHPEFIGIKIIYNDMRSKDVAVIAESIRMAMGLRIKFPTVVAGFDLVGHEDTGHSLHDYKEALMIPAKDGVKLPYFFHAGETDWQGTSIDRNILDALMLNTTRIGHGFALSKHPAVRTYSWKKDIPIEVCPISNQVLKLVSDLRNHPVATLMATGHPMVISSDDPAMFGAKGLSYDFYEVFMGIGGMKADLRTLKQLAMNSIKYSTLLESEKNTFMEIWKKRWDKFIADVATK

SEQ ID NO: 846 - protein, 482 aa, synthetic construct
  REGION 1..482: note = human ADA2 R219Q/S262N/H264P, mature numbering
IDETRAHLLLKEKMMRLGGRLVLNTKEELANERLMTLKIAEMKEAMRTLIFPPSMHFFQAKHLIERSQVFNILRMMPKGAALHLHDIGIVTMDWLVRNVTYRPHCHICFTPRGIMQFRFAHPTPRPSEKCSKWILLEDYRKRVQNVTEFDDSLLRNFTLVTQHPEVIYTNQNVVWSKFETIFFTISGLIHYAPVFRDYVFRSMQEFYEDNVLYMEIRAQLLPVYELSGEHHDEEWSVKTYQEVAQKFVETHPEFIGIKIIYNDPRSKDVAVIAESIRMAMGLRIKFPTVVAGFDLVGHEDTGHSLHDYKEALMIPAKDGVKLPYFFHAGETDWQGTSIDRNILDALMLNTTRIGHGFALSKHPAVRTYSWKKDIPIEVCPISNQVLKLVSDLRNHPVATLMATGHPMVISSDDPAMFGAKGLSYDFYEVFMGIGGMKADLRTLKQLAMNSIKYSTLLESEKNTFMEIWKKRWDKFIADVATK

SEQ ID NO: 847 - protein, 482 aa, synthetic construct
  REGION 1..482: note = human ADA2 R219Q/S262N/H264R, mature numbering
IDETRAHLLLKEKMMRLGGRLVLNTKEELANERLMTLKIAEMKEAMRTLIFPPSMHFFQAKHLIERSQVFNILRMMPKGAALHLHDIGIVTMDWLVRNVTYRPHCHICFTPRGIMQFRFAHPTPRPSEKCSKWILLEDYRKRVQNVTEFDDSLLRNFTLVTQHPEVIYTNQNVVWSKFETIFFTISGLIHYAPVFRDYVFRSMQEFYEDNVLYMEIRAQLLPVYELSGEHHDEEWSVKTYQEVAQKFVETHPEFIGIKIIYNDRRSKDVAVIAESIRMAMGLRIKFPTVVAGFDLVGHEDTGHSLHDYKEALMIPAKDGVKLPYFFHAGETDWQGTSIDRNILDALMLNTTRIGHGFALSKHPAVRTYSWKKDIPIEVCPISNQVLKLVSDLRNHPVATLMATGHPMVISSDDPAMFGAKGLSYDFYEVFMGIGGMKADLRTLKQLAMNSIKYSTLLESEKNTFMEIWKKRWDKFIADVATK

SEQ ID NO: 848 - protein, 482 aa, synthetic construct
  REGION 1..482: note = human ADA2 R219Q/S262N/H264S, mature numbering
IDETRAHLLLKEKMMRLGGRLVLNTKEELANERLMTLKIAEMKEAMRTLIFPPSMHFFQAKHLIERSQVFNILRMMPKGAALHLHDIGIVTMDWLVRNVTYRPHCHICFTPRGIMQFRFAHPTPRPSEKCSKWILLEDYRKRVQNVTEFDDSLLRNFTLVTQHPEVIYTNQNVVWSKFETIFFTISGLIHYAPVFRDYVFRSMQEFYEDNVLYMEIRAQLLPVYELSGEHHDEEWSVKTYQEVAQKFVETHPEFIGIKIIYNDSRSKDVAVIAESIRMAMGLRIKFPTVVAGFDLVGHEDTGHSLHDYKEALMIPAKDGVKLPYFFHAGETDWQGTSIDRNILDALMLNTTRIGHGFALSKHPAVRTYSWKKDIPIEVCPISNQVLKLVSDLRNHPVATLMATGHPMVISSDDPAMFGAKGLSYDFYEVFMGIGGMKADLRTLKQLAMNSIKYSTLLESEKNTFMEIWKKRWDKFIADVATK

SEQ ID NO: 849 - protein, 482 aa, synthetic construct
  REGION 1..482: note = human ADA2 R219Q/S262N/H264T, mature numbering
IDETRAHLLLKEKMMRLGGRLVLNTKEELANERLMTLKIAEMKEAMRTLIFPPSMHFFQAKHLIERSQVFNILRMMPKGAALHLHDIGIVTMDWLVRNVTYRPHCHICFTPRGIMQFRFAHPTPRPSEKCSKWILLEDYRKRVQNVTEFDDSLLRNFTLVTQHPEVIYTNQNVVWSKFETIFFTISGLIHYAPVFRDYVFRSMQEFYEDNVLYMEIRAQLLPVYELSGEHHDEEWSVKTYQEVAQKFVETHPEFIGIKIIYNDTRSKDVAVIAESIRMAMGLRIKFPTVVAGFDLVGHEDTGHSLHDYKEALMIPAKDGVKLPYFFHAGETDWQGTSIDRNILDALMLNTTRIGHGFALSKHPAVRTYSWKKDIPIEVCPISNQVLKLVSDLRNHPVATLMATGHPMVISSDDPAMFGAKGLSYDFYEVFMGIGGMKADLRTLKQLAMNSIKYSTLLESEKNTFMEIWKKRWDKFIADVATK

SEQ ID NO: 850 - protein, 482 aa, synthetic construct
  REGION 1..482: note = human ADA2 R219Q/S262N/H264V, mature numbering
IDETRAHLLLKEKMMRLGGRLVLNTKEELANERLMTLKIAEMKEAMRTLIFPPSMHFFQAKHLIERSQVFNILRMMPKGAALHLHDIGIVTMDWLVRNVTYRPHCHICFTPRGIMQFRFAHPTPRPSEKCSKWILLEDYRKRVQNVTEFDDSLLRNFTLVTQHPEVIYTNQNVVWSKFETIFFTISGLIHYAPVFRDYVFRSMQEFYEDNVLYMEIRAQLLPVYELSGEHHDEEWSVKTYQEVAQKFVETHPEFIGIKIIYNDVRSKDVAVIAESIRMAMGLRIKFPTVVAGFDLVGHEDTGHSLHDYKEALMIPAKDGVKLPYFFHAGETDWQGTSIDRNILDALMLNTTRIGHGFALSKHPAVRTYSWKKDIPIEVCPISNQVLKLVSDLRNHPVATLMATGHPMVISSDDPAMFGAKGLSYDFYEVFMGIGGMKADLRTLKQLAMNSIKYSTLLESEKNTFMEIWKKRWDKFIADVATK

SEQ ID NO: 851 - protein, 482 aa, synthetic construct
  REGION 1..482: note = human ADA2 R219Q/S262N/H264W, mature numbering
IDETRAHLLLKEKMMRLGGRLVLNTKEELANERLMTLKIAEMKEAMRTLIFPPSMHFFQAKHLIERSQVFNILRMMPKGAALHLHDIGIVTMDWLVRNVTYRPHCHICFTPRGIMQFRFAHPTPRPSEKCSKWILLEDYRKRVQNVTEFDDSLLRNFTLVTQHPEVIYTNQNVVWSKFETIFFTISGLIHYAPVFRDYVFRSMQEFYEDNVLYMEIRAQLLPVYELSGEHHDEEWSVKTYQEVAQKFVETHPEFIGIKIIYNDWRSKDVAVIAESIRMAMGLRIKFPTVVAGFDLVGHEDTGHSLHDYKEALMIPAKDGVKLPYFFHAGETDWQGTSIDRNILDALMLNTTRIGHGFALSKHPAVRTYSWKKDIPIEVCPISNQVLKLVSDLRNHPVATLMATGHPMVISSDDPAMFGAKGLSYDFYEVFMGIGGMKADLRTLKQLAMNSIKYSTLLESEKNTFMEIWKKRWDKFIADVATK

SEQ ID NO: 852 - protein, 482 aa, synthetic construct
  REGION 1..482: note = human ADA2 R219Q/S262N/H264Y, mature numbering
IDETRAHLLLKEKMMRLGGRLVLNTKEELANERLMTLKIAEMKEAMRTLIFPPSMHFFQAKHLIERSQVFNILRMMPKGAALHLHDIGIVTMDWLVRNVTYRPHCHICFTPRGIMQFRFAHPTPRPSEKCSKWILLEDYRKRVQNVTEFDDSLLRNFTLVTQHPEVIYTNQNVVWSKFETIFFTISGLIHYAPVFRDYVFRSMQEFYEDNVLYMEIRAQLLPVYELSGEHHDEEWSVKTYQEVAQKFVETHPEFIGIKIIYNDYRSKDVAVIAESIRMAMGLRIKFPTVVAGFDLVGHEDTGHSLHDYKEALMIPAKDGVKLPYFFHAGETDWQGTSIDRNILDALMLNTTRIGHGFALSKHPAVRTYSWKKDIPIEVCPISNQVLKLVSDLRNHPVATLMATGHPMVISSDDPAMFGAKGLSYDFYEVFMGIGGMKADLRTLKQLAMNSIKYSTLLESEKNTFMEIWKKRWDKFIADVATK

SEQ ID NO: 853 - protein, 482 aa, synthetic construct
  REGION 1..482: note = human ADA2 R219Q/S262N/S266A, mature numbering
IDETRAHLLLKEKMMRLGGRLVLNTKEELANERLMTLKIAEMKEAMRTLIFPPSMHFFQAKHLIERSQVFNILRMMPKGAALHLHDIGIVTMDWLVRNVTYRPHCHICFTPRGIMQFRFAHPTPRPSEKCSKWILLEDYRKRVQNVTEFDDSLLRNFTLVTQHPEVIYTNQNVVWSKFETIFFTISGLIHYAPVFRDYVFRSMQEFYEDNVLYMEIRAQLLPVYELSGEHHDEEWSVKTYQEVAQKFVETHPEFIGIKIIYNDHRAKDVAVIAESIRMAMGLRIKFPTVVAGFDLVGHEDTGHSLHDYKEALMIPAKDGVKLPYFFHAGETDWQGTSIDRNILDALMLNTTRIGHGFALSKHPAVRTYSWKKDIPIEVCPISNQVLKLVSDLRNHPVATLMATGHPMVISSDDPAMFGAKGLSYDFYEVFMGIGGMKADLRTLKQLAMNSIKYSTLLESEKNTFMEIWKKRWDKFIADVATK

SEQ ID NO: 854 - protein, 482 aa, synthetic construct
  REGION 1..482: note = human ADA2 R219Q/S262N/S266C, mature numbering
IDETRAHLLLKEKMMRLGGRLVLNTKEELANERLMTLKIAEMKEAMRTLIFPPSMHFFQAKHLIERSQVFNILRMMPKGAALHLHDIGIVTMDWLVRNVTYRPHCHICFTPRGIMQFRFAHPTPRPSEKCSKWILLEDYRKRVQNVTEFDDSLLRNFTLVTQHPEVIYTNQNVVWSKFETIFFTISGLIHYAPVFRDYVFRSMQEFYEDNVLYMEIRAQLLPVYELSGEHHDEEWSVKTYQEVAQKFVETHPEFIGIKIIYNDHRCKDVAVIAESIRMAMGLRIKFPTVVAGFDLVGHEDTGHSLHDYKEALMIPAKDGVKLPYFFHAGETDWQGTSIDRNILDALMLNTTRIGHGFALSKHPAVRTYSWKKDIPIEVCPISNQVLKLVSDLRNHPVATLMATGHPMVISSDDPAMFGAKGLSYDFYEVFMGIGGMKADLRTLKQLAMNSIKYSTLLESEKNTFMEIWKKRWDKFIADVATK

SEQ ID NO: 855 - protein, 482 aa, synthetic construct
  REGION 1..482: note = human ADA2 R219Q/S262N/S266D, mature numbering
IDETRAHLLLKEKMMRLGGRLVLNTKEELANERLMTLKIAEMKEAMRTLIFPPSMHFFQAKHLIERSQVFNILRMMPKGAALHLHDIGIVTMDWLVRNVTYRPHCHICFTPRGIMQFRFAHPTPRPSEKCSKWILLEDYRKRVQNVTEFDDSLLRNFTLVTQHPEVIYTNQNVVWSKFETIFFTISGLIHYAPVFRDYVFRSMQEFYEDNVLYMEIRAQLLPVYELSGEHHDEEWSVKTYQEVAQKFVETHPEFIGIKIIYNDHRDKDVAVIAESIRMAMGLRIKFPTVVAGFDLVGHEDTGHSLHDYKEALMIPAKDGVKLPYFFHAGETDWQGTSIDRNILDALMLNTTRIGHGFALSKHPAVRTYSWKKDIPIEVCPISNQVLKLVSDLRNHPVATLMATGHPMVISSDDPAMFGAKGLSYDFYEVFMGIGGMKADLRTLKQLAMNSIKYSTLLESEKNTFMEIWKKRWDKFIADVATK

SEQ ID NO: 856 - protein, 482 aa, synthetic construct
  REGION 1..482: note = human ADA2 R219Q/S262N/S266E, mature numbering
IDETRAHLLLKEKMMRLGGRLVLNTKEELANERLMTLKIAEMKEAMRTLIFPPSMHFFQAKHLIERSQVFNILRMMPKGAALHLHDIGIVTMDWLVRNVTYRPHCHICFTPRGIMQFRFAHPTPRPSEKCSKWILLEDYRKRVQNVTEFDDSLLRNFTLVTQHPEVIYTNQNVVWSKFETIFFTISGLIHYAPVFRDYVFRSMQEFYEDNVLYMEIRAQLLPVYELSGEHHDEEWSVKTYQEVAQKFVETHPEFIGIKIIYNDHREKDVAVIAESIRMAMGLRIKFPTVVAGFDLVGHEDTGHSLHDYKEALMIPAKDGVKLPYFFHAGETDWQGTSIDRNILDALMLNTTRIGHGFALSKHPAVRTYSWKKDIPIEVCPISNQVLKLVSDLRNHPVATLMATGHPMVISSDDPAMFGAKGLSYDFYEVFMGIGGMKADLRTLKQLAMNSIKYSTLLESEKNTFMEIWKKRWDKFIADVATK

SEQ ID NO: 857 - protein, 482 aa, synthetic construct
  REGION 1..482: note = human ADA2 R219Q/S262N/S266F, mature numbering
IDETRAHLLLKEKMMRLGGRLVLNTKEELANERLMTLKIAEMKEAMRTLIFPPSMHFFQAKHLIERSQVFNILRMMPKGAALHLHDIGIVTMDWLVRNVTYRPHCHICFTPRGIMQFRFAHPTPRPSEKCSKWILLEDYRKRVQNVTEFDDSLLRNFTLVTQHPEVIYTNQNVVWSKFETIFFTISGLIHYAPVFRDYVFRSMQEFYEDNVLYMEIRAQLLPVYELSGEHHDEEWSVKTYQEVAQKFVETHPEFIGIKIIYNDHRFKDVAVIAESIRMAMGLRIKFPTVVAGFDLVGHEDTGHSLHDYKEALMIPAKDGVKLPYFFHAGETDWQGTSIDRNILDALMLNTTRIGHGFALSKHPAVRTYSWKKDIPIEVCPISNQVLKLVSDLRNHPVATLMATGHPMVISSDDPAMFGAKGLSYDFYEVFMGIGGMKADLRTLKQLAMNSIKYSTLLESEKNTFMEIWKKRWDKFIADVATK

SEQ ID NO: 858 - protein, 482 aa, synthetic construct
  REGION 1..482: note = human ADA2 R219Q/S262N/S266G, mature numbering
IDETRAHLLLKEKMMRLGGRLVLNTKEELANERLMTLKIAEMKEAMRTLIFPPSMHFFQAKHLIERSQVFNILRMMPKGAALHLHDIGIVTMDWLVRNVTYRPHCHICFTPRGIMQFRFAHPTPRPSEKCSKWILLEDYRKRVQNVTEFDDSLLRNFTLVTQHPEVIYTNQNVVWSKFETIFFTISGLIHYAPVFRDYVFRSMQEFYEDNVLYMEIRAQLLPVYELSGEHHDEEWSVKTYQEVAQKFVETHPEFIGIKIIYNDHRGKDVAVIAESIRMAMGLRIKFPTVVAGFDLVGHEDTGHSLHDYKEALMIPAKDGVKLPYFFHAGETDWQGTSIDRNILDALMLNTTRIGHGFALSKHPAVRTYSWKKDIPIEVCPISNQVLKLVSDLRNHPVATLMATGHPMVISSDDPAMFGAKGLSYDFYEVFMGIGGMKADLRTLKQLAMNSIKYSTLLESEKNTFMEIWKKRWDKFIADVATK

SEQ ID NO: 859 - protein, 482 aa, synthetic construct
  REGION 1..482: note = human ADA2 R219Q/S262N/S266H, mature numbering
IDETRAHLLLKEKMMRLGGRLVLNTKEELANERLMTLKIAEMKEAMRTLIFPPSMHFFQAKHLIERSQVFNILRMMPKGAALHLHDIGIVTMDWLVRNVTYRPHCHICFTPRGIMQFRFAHPTPRPSEKCSKWILLEDYRKRVQNVTEFDDSLLRNFTLVTQHPEVIYTNQNVVWSKFETIFFTISGLIHYAPVFRDYVFRSMQEFYEDNVLYMEIRAQLLPVYELSGEHHDEEWSVKTYQEVAQKFVETHPEFIGIKIIYNDHRHKDVAVIAESIRMAMGLRIKFPTVVAGFDLVGHEDTGHSLHDYKEALMIPAKDGVKLPYFFHAGETDWQGTSIDRNILDALMLNTTRIGHGFALSKHPAVRTYSWKKDIPIEVCPISNQVLKLVSDLRNHPVATLMATGHPMVISSDDPAMFGAKGLSYDFYEVFMGIGGMKADLRTLKQLAMNSIKYSTLLESEKNTFMEIWKKRWDKFIADVATK

SEQ ID NO: 860 - protein, 482 aa, synthetic construct
  REGION 1..482: note = human ADA2 R219Q/S262N/S266I, mature numbering
IDETRAHLLLKEKMMRLGGRLVLNTKEELANERLMTLKIAEMKEAMRTLIFPPSMHFFQAKHLIERSQVFNILRMMPKGAALHLHDIGIVTMDWLVRNVTYRPHCHICFTPRGIMQFRFAHPTPRPSEKCSKWILLEDYRKRVQNVTEFDDSLLRNFTLVTQHPEVIYTNQNVVWSKFETIFFTISGLIHYAPVFRDYVFRSMQEFYEDNVLYMEIRAQLLPVYELSGEHHDEEWSVKTYQEVAQKFVETHPEFIGIKIIYNDHRIKDVAVIAESIRMAMGLRIKFPTVVAGFDLVGHEDTGHSLHDYKEALMIPAKDGVKLPYFFHAGETDWQGTSIDRNILDALMLNTTRIGHGFALSKHPAVRTYSWKKDIPIEVCPISNQVLKLVSDLRNHPVATLMATGHPMVISSDDPAMFGAKGLSYDFYEVFMGIGGMKADLRTLKQLAMNSIKYSTLLESEKNTFMEIWKKRWDKFIADVATK

SEQ ID NO: 861 - protein, 482 aa, synthetic construct
  REGION 1..482: note = human ADA2 R219Q/S262N/S266K, mature numbering
IDETRAHLLLKEKMMRLGGRLVLNTKEELANERLMTLKIAEMKEAMRTLIFPPSMHFFQAKHLIERSQVFNILRMMPKGAALHLHDIGIVTMDWLVRNVTYRPHCHICFTPRGIMQFRFAHPTPRPSEKCSKWILLEDYRKRVQNVTEFDDSLLRNFTLVTQHPEVIYTNQNVVWSKFETIFFTISGLIHYAPVFRDYVFRSMQEFYEDNVLYMEIRAQLLPVYELSGEHHDEEWSVKTYQEVAQKFVETHPEFIGIKIIYNDHRKKDVAVIAESIRMAMGLRIKFPTVVAGFDLVGHEDTGHSLHDYKEALMIPAKDGVKLPYFFHAGETDWQGTSIDRNILDALMLNTTRIGHGFALSKHPAVRTYSWKKDIPIEVCPISNQVLKLVSDLRNHPVATLMATGHPMVISSDDPAMFGAKGLSYDFYEVFMGIGGMKADLRTLKQLAMNSIKYSTLLESEKNTFMEIWKKRWDKFIADVATK

SEQ ID NO: 862 - protein, 482 aa, synthetic construct
  REGION 1..482: note = human ADA2 R219Q/S262N/S266L, mature numbering
IDETRAHLLLKEKMMRLGGRLVLNTKEELANERLMTLKIAEMKEAMRTLIFPPSMHFFQAKHLIERSQVFNILRMMPKGAALHLHDIGIVTMDWLVRNVTYRPHCHICFTPRGIMQFRFAHPTPRPSEKCSKWILLEDYRKRVQNVTEFDDSLLRNFTLVTQHPEVIYTNQNVVWSKFETIFFTISGLIHYAPVFRDYVFRSMQEFYEDNVLYMEIRAQLLPVYELSGEHHDEEWSVKTYQEVAQKFVETHPEFIGIKIIYNDHRLKDVAVIAESIRMAMGLRIKFPTVVAGFDLVGHEDTGHSLHDYKEALMIPAKDGVKLPYFFHAGETDWQGTSIDRNILDALMLNTTRIGHGFALSKHPAVRTYSWKKDIPIEVCPISNQVLKLVSDLRNHPVATLMATGHPMVISSDDPAMFGAKGLSYDFYEVFMGIGGMKADLRTLKQLAMNSIKYSTLLESEKNTFMEIWKKRWDKFIADVATK

SEQ ID NO: 863 - protein, 482 aa, synthetic construct
  REGION 1..482: note = human ADA2 R219Q/S262N/S266M, mature numbering
IDETRAHLLLKEKMMRLGGRLVLNTKEELANERLMTLKIAEMKEAMRTLIFPPSMHFFQAKHLIERSQVFNILRMMPKGAALHLHDIGIVTMDWLVRNVTYRPHCHICFTPRGIMQFRFAHPTPRPSEKCSKWILLEDYRKRVQNVTEFDDSLLRNFTLVTQHPEVIYTNQNVVWSKFETIFFTISGLIHYAPVFRDYVFRSMQEFYEDNVLYMEIRAQLLPVYELSGEHHDEEWSVKTYQEVAQKFVETHPEFIGIKIIYNDHRMKDVAVIAESIRMAMGLRIKFPTVVAGFDLVGHEDTGHSLHDYKEALMIPAKDGVKLPYFFHAGETDWQGTSIDRNILDALMLNTTRIGHGFALSKHPAVRTYSWKKDIPIEVCPISNQVLKLVSDLRNHPVATLMATGHPMVISSDDPAMFGAKGLSYDFYEVFMGIGGMKADLRTLKQLAMNSIKYSTLLESEKNTFMEIWKKRWDKFIADVATK

SEQ ID NO: 864 - protein, 482 aa, synthetic construct
  REGION 1..482: note = human ADA2 R219Q/S262N/S266N, mature numbering
IDETRAHLLLKEKMMRLGGRLVLNTKEELANERLMTLKIAEMKEAMRTLIFPPSMHFFQAKHLIERSQVFNILRMMPKGAALHLHDIGIVTMDWLVRNVTYRPHCHICFTPRGIMQFRFAHPTPRPSEKCSKWILLEDYRKRVQNVTEFDDSLLRNFTLVTQHPEVIYTNQNVVWSKFETIFFTISGLIHYAPVFRDYVFRSMQEFYEDNVLYMEIRAQLLPVYELSGEHHDEEWSVKTYQEVAQKFVETHPEFIGIKIIYNDHRNKDVAVIAESIRMAMGLRIKFPTVVAGFDLVGHEDTGHSLHDYKEALMIPAKDGVKLPYFFHAGETDWQGTSIDRNILDALMLNTTRIGHGFALSKHPAVRTYSWKKDIPIEVCPISNQVLKLVSDLRNHPVATLMATGHPMVISSDDPAMFGAKGLSYDFYEVFMGIGGMKADLRTLKQLAMNSIKYSTLLESEKNTFMEIWKKRWDKFIADVATK

SEQ ID NO: 865 - protein, 482 aa, synthetic construct
  REGION 1..482: note = human ADA2 R219Q/S262N/S266P, mature numbering
IDETRAHLLLKEKMMRLGGRLVLNTKEELANERLMTLKIAEMKEAMRTLIFPPSMHFFQAKHLIERSQVFNILRMMPKGAALHLHDIGIVTMDWLVRNVTYRPHCHICFTPRGIMQFRFAHPTPRPSEKCSKWILLEDYRKRVQNVTEFDDSLLRNFTLVTQHPEVIYTNQNVVWSKFETIFFTISGLIHYAPVFRDYVFRSMQEFYEDNVLYMEIRAQLLPVYELSGEHHDEEWSVKTYQEVAQKFVETHPEFIGIKIIYNDHRPKDVAVIAESIRMAMGLRIKFPTVVAGFDLVGHEDTGHSLHDYKEALMIPAKDGVKLPYFFHAGETDWQGTSIDRNILDALMLNTTRIGHGFALSKHPAVRTYSWKKDIPIEVCPISNQVLKLVSDLRNHPVATLMATGHPMVISSDDPAMFGAKGLSYDFYEVFMGIGGMKADLRTLKQLAMNSIKYSTLLESEKNTFMEIWKKRWDKFIADVATK

SEQ ID NO: 866 - protein, 482 aa, synthetic construct
  REGION 1..482: note = human ADA2 R219Q/S262N/S266Q, mature numbering
IDETRAHLLLKEKMMRLGGRLVLNTKEELANERLMTLKIAEMKEAMRTLIFPPSMHFFQAKHLIERSQVFNILRMMPKGAALHLHDIGIVTMDWLVRNVTYRPHCHICFTPRGIMQFRFAHPTPRPSEKCSKWILLEDYRKRVQNVTEFDDSLLRNFTLVTQHPEVIYTNQNVVWSKFETIFFTISGLIHYAPVFRDYVFRSMQEFYEDNVLYMEIRAQLLPVYELSGEHHDEEWSVKTYQEVAQKFVETHPEFIGIKIIYNDHRQKDVAVIAESIRMAMGLRIKFPTVVAGFDLVGHEDTGHSLHDYKEALMIPAKDGVKLPYFFHAGETDWQGTSIDRNILDALMLNTTRIGHGFALSKHPAVRTYSWKKDIPIEVCPISNQVLKLVSDLRNHPVATLMATGHPMVISSDDPAMFGAKGLSYDFYEVFMGIGGMKADLRTLKQLAMNSIKYSTLLESEKNTFMEIWKKRWDKFIADVATK

SEQ ID NO: 867 - protein, 482 aa, synthetic construct
  REGION 1..482: note = human ADA2 R219Q/S262N/S266R, mature numbering
IDETRAHLLLKEKMMRLGGRLVLNTKEELANERLMTLKIAEMKEAMRTLIFPPSMHFFQAKHLIERSQVFNILRMMPKGAALHLHDIGIVTMDWLVRNVTYRPHCHICFTPRGIMQFRFAHPTPRPSEKCSKWILLEDYRKRVQNVTEFDDSLLRNFTLVTQHPEVIYTNQNVVWSKFETIFFTISGLIHYAPVFRDYVFRSMQEFYEDNVLYMEIRAQLLPVYELSGEHHDEEWSVKTYQEVAQKFVETHPEFIGIKIIYNDHRRKDVAVIAESIRMAMGLRIKFPTVVAGFDLVGHEDTGHSLHDYKEALMIPAKDGVKLPYFFHAGETDWQGTSIDRNILDALMLNTTRIGHGFALSKHPAVRTYSWKKDIPIEVCPISNQVLKLVSDLRNHPVATLMATGHPMVISSDDPAMFGAKGLSYDFYEVFMGIGGMKADLRTLKQLAMNSIKYSTLLESEKNTFMEIWKKRWDKFIADVATK

SEQ ID NO: 868 - protein, 482 aa, synthetic construct
  REGION 1..482: note = human ADA2 R219Q/S262N/S266T, mature numbering
IDETRAHLLLKEKMMRLGGRLVLNTKEELANERLMTLKIAEMKEAMRTLIFPPSMHFFQAKHLIERSQVFNILRMMPKGAALHLHDIGIVTMDWLVRNVTYRPHCHICFTPRGIMQFRFAHPTPRPSEKCSKWILLEDYRKRVQNVTEFDDSLLRNFTLVTQHPEVIYTNQNVVWSKFETIFFTISGLIHYAPVFRDYVFRSMQEFYEDNVLYMEIRAQLLPVYELSGEHHDEEWSVKTYQEVAQKFVETHPEFIGIKIIYNDHRTKDVAVIAESIRMAMGLRIKFPTVVAGFDLVGHEDTGHSLHDYKEALMIPAKDGVKLPYFFHAGETDWQGTSIDRNILDALMLNTTRIGHGFALSKHPAVRTYSWKKDIPIEVCPISNQVLKLVSDLRNHPVATLMATGHPMVISSDDPAMFGAKGLSYDFYEVFMGIGGMKADLRTLKQLAMNSIKYSTLLESEKNTFMEIWKKRWDKFIADVATK

SEQ ID NO: 869 - protein, 482 aa, synthetic construct
  REGION 1..482: note = human ADA2 R219Q/S262N/S266V, mature numbering
IDETRAHLLLKEKMMRLGGRLVLNTKEELANERLMTLKIAEMKEAMRTLIFPPSMHFFQAKHLIERSQVFNILRMMPKGAALHLHDIGIVTMDWLVRNVTYRPHCHICFTPRGIMQFRFAHPTPRPSEKCSKWILLEDYRKRVQNVTEFDDSLLRNFTLVTQHPEVIYTNQNVVWSKFETIFFTISGLIHYAPVFRDYVFRSMQEFYEDNVLYMEIRAQLLPVYELSGEHHDEEWSVKTYQEVAQKFVETHPEFIGIKIIYNDHRVKDVAVIAESIRMAMGLRIKFPTVVAGFDLVGHEDTGHSLHDYKEALMIPAKDGVKLPYFFHAGETDWQGTSIDRNILDALMLNTTRIGHGFALSKHPAVRTYSWKKDIPIEVCPISNQVLKLVSDLRNHPVATLMATGHPMVISSDDPAMFGAKGLSYDFYEVFMGIGGMKADLRTLKQLAMNSIKYSTLLESEKNTFMEIWKKRWDKFIADVATK

SEQ ID NO: 870 - protein, 482 aa, synthetic construct
  REGION 1..482: note = human ADA2 R219Q/S262N/S266W, mature numbering
IDETRAHLLLKEKMMRLGGRLVLNTKEELANERLMTLKIAEMKEAMRTLIFPPSMHFFQAKHLIERSQVFNILRMMPKGAALHLHDIGIVTMDWLVRNVTYRPHCHICFTPRGIMQFRFAHPTPRPSEKCSKWILLEDYRKRVQNVTEFDDSLLRNFTLVTQHPEVIYTNQNVVWSKFETIFFTISGLIHYAPVFRDYVFRSMQEFYEDNVLYMEIRAQLLPVYELSGEHHDEEWSVKTYQEVAQKFVETHPEFIGIKIIYNDHRWKDVAVIAESIRMAMGLRIKFPTVVAGFDLVGHEDTGHSLHDYKEALMIPAKDGVKLPYFFHAGETDWQGTSIDRNILDALMLNTTRIGHGFALSKHPAVRTYSWKKDIPIEVCPISNQVLKLVSDLRNHPVATLMATGHPMVISSDDPAMFGAKGLSYDFYEVFMGIGGMKADLRTLKQLAMNSIKYSTLLESEKNTFMEIWKKRWDKFIADVATK

SEQ ID NO: 871 - protein, 482 aa, synthetic construct
  REGION 1..482: note = human ADA2 R219Q/S262N/S266Y, mature numbering
IDETRAHLLLKEKMMRLGGRLVLNTKEELANERLMTLKIAEMKEAMRTLIFPPSMHFFQAKHLIERSQVFNILRMMPKGAALHLHDIGIVTMDWLVRNVTYRPHCHICFTPRGIMQFRFAHPTPRPSEKCSKWILLEDYRKRVQNVTEFDDSLLRNFTLVTQHPEVIYTNQNVVWSKFETIFFTISGLIHYAPVFRDYVFRSMQEFYEDNVLYMEIRAQLLPVYELSGEHHDEEWSVKTYQEVAQKFVETHPEFIGIKIIYNDHRYKDVAVIAESIRMAMGLRIKFPTVVAGFDLVGHEDTGHSLHDYKEALMIPAKDGVKLPYFFHAGETDWQGTSIDRNILDALMLNTTRIGHGFALSKHPAVRTYSWKKDIPIEVCPISNQVLKLVSDLRNHPVATLMATGHPMVISSDDPAMFGAKGLSYDFYEVFMGIGGMKADLRTLKQLAMNSIKYSTLLESEKNTFMEIWKKRWDKFIADVATK

SEQ ID NO: 872 - protein, 482 aa, synthetic construct
  REGION 1..482: note = human ADA2 R219Q/S262N/K267A, mature numbering
IDETRAHLLLKEKMMRLGGRLVLNTKEELANERLMTLKIAEMKEAMRTLIFPPSMHFFQAKHLIERSQVFNILRMMPKGAALHLHDIGIVTMDWLVRNVTYRPHCHICFTPRGIMQFRFAHPTPRPSEKCSKWILLEDYRKRVQNVTEFDDSLLRNFTLVTQHPEVIYTNQNVVWSKFETIFFTISGLIHYAPVFRDYVFRSMQEFYEDNVLYMEIRAQLLPVYELSGEHHDEEWSVKTYQEVAQKFVETHPEFIGIKIIYNDHRSADVAVIAESIRMAMGLRIKFPTVVAGFDLVGHEDTGHSLHDYKEALMIPAKDGVKLPYFFHAGETDWQGTSIDRNILDALMLNTTRIGHGFALSKHPAVRTYSWKKDIPIEVCPISNQVLKLVSDLRNHPVATLMATGHPMVISSDDPAMFGAKGLSYDFYEVFMGIGGMKADLRTLKQLAMNSIKYSTLLESEKNTFMEIWKKRWDKFIADVATK

SEQ ID NO: 873 - protein, 482 aa, synthetic construct
  REGION 1..482: note = human ADA2 R219Q/S262N/K267C, mature numbering
IDETRAHLLLKEKMMRLGGRLVLNTKEELANERLMTLKIAEMKEAMRTLIFPPSMHFFQAKHLIERSQVFNILRMMPKGAALHLHDIGIVTMDWLVRNVTYRPHCHICFTPRGIMQFRFAHPTPRPSEKCSKWILLEDYRKRVQNVTEFDDSLLRNFTLVTQHPEVIYTNQNVVWSKFETIFFTISGLIHYAPVFRDYVFRSMQEFYEDNVLYMEIRAQLLPVYELSGEHHDEEWSVKTYQEVAQKFVETHPEFIGIKIIYNDHRSCDVAVIAESIRMAMGLRIKFPTVVAGFDLVGHEDTGHSLHDYKEALMIPAKDGVKLPYFFHAGETDWQGTSIDRNILDALMLNTTRIGHGFALSKHPAVRTYSWKKDIPIEVCPISNQVLKLVSDLRNHPVATLMATGHPMVISSDDPAMFGAKGLSYDFYEVFMGIGGMKADLRTLKQLAMNSIKYSTLLESEKNTFMEIWKKRWDKFIADVATK

SEQ ID NO: 874 - protein, 482 aa, synthetic construct
  REGION 1..482: note = human ADA2 R219Q/S262N/K267D, mature numbering
IDETRAHLLLKEKMMRLGGRLVLNTKEELANERLMTLKIAEMKEAMRTLIFPPSMHFFQAKHLIERSQVFNILRMMPKGAALHLHDIGIVTMDWLVRNVTYRPHCHICFTPRGIMQFRFAHPTPRPSEKCSKWILLEDYRKRVQNVTEFDDSLLRNFTLVTQHPEVIYTNQNVVWSKFETIFFTISGLIHYAPVFRDYVFRSMQEFYEDNVLYMEIRAQLLPVYELSGEHHDEEWSVKTYQEVAQKFVETHPEFIGIKIIYNDHRSDDVAVIAESIRMAMGLRIKFPTVVAGFDLVGHEDTGHSLHDYKEALMIPAKDGVKLPYFFHAGETDWQGTSIDRNILDALMLNTTRIGHGFALSKHPAVRTYSWKKDIPIEVCPISNQVLKLVSDLRNHPVATLMATGHPMVISSDDPAMFGAKGLSYDFYEVFMGIGGMKADLRTLKQLAMNSIKYSTLLESEKNTFMEIWKKRWDKFIADVATK

SEQ ID NO: 875 - protein, 482 aa, synthetic construct
  REGION 1..482: note = human ADA2 R219Q/S262N/K267E, mature numbering
IDETRAHLLLKEKMMRLGGRLVLNTKEELANERLMTLKIAEMKEAMRTLIFPPSMHFFQAKHLIERSQVFNILRMMPKGAALHLHDIGIVTMDWLVRNVTYRPHCHICFTPRGIMQFRFAHPTPRPSEKCSKWILLEDYRKRVQNVTEFDDSLLRNFTLVTQHPEVIYTNQNVVWSKFETIFFTISGLIHYAPVFRDYVFRSMQEFYEDNVLYMEIRAQLLPVYELSGEHHDEEWSVKTYQEVAQKFVETHPEFIGIKIIYNDHRSEDVAVIAESIRMAMGLRIKFPTVVAGFDLVGHEDTGHSLHDYKEALMIPAKDGVKLPYFFHAGETDWQGTSIDRNILDALMLNTTRIGHGFALSKHPAVRTYSWKKDIPIEVCPISNQVLKLVSDLRNHPVATLMATGHPMVISSDDPAMFGAKGLSYDFYEVFMGIGGMKADLRTLKQLAMNSIKYSTLLESEKNTFMEIWKKRWDKFIADVATK

SEQ ID NO: 876 - protein, 482 aa, synthetic construct
  REGION 1..482: note = human ADA2 R219Q/S262N/K267F, mature numbering
IDETRAHLLLKEKMMRLGGRLVLNTKEELANERLMTLKIAEMKEAMRTLIFPPSMHFFQAKHLIERSQVFNILRMMPKGAALHLHDIGIVTMDWLVRNVTYRPHCHICFTPRGIMQFRFAHPTPRPSEKCSKWILLEDYRKRVQNVTEFDDSLLRNFTLVTQHPEVIYTNQNVVWSKFETIFFTISGLIHYAPVFRDYVFRSMQEFYEDNVLYMEIRAQLLPVYELSGEHHDEEWSVKTYQEVAQKFVETHPEFIGIKIIYNDHRSFDVAVIAESIRMAMGLRIKFPTVVAGFDLVGHEDTGHSLHDYKEALMIPAKDGVKLPYFFHAGETDWQGTSIDRNILDALMLNTTRIGHGFALSKHPAVRTYSWKKDIPIEVCPISNQVLKLVSDLRNHPVATLMATGHPMVISSDDPAMFGAKGLSYDFYEVFMGIGGMKADLRTLKQLAMNSIKYSTLLESEKNTFMEIWKKRWDKFIADVATK

SEQ ID NO: 877 - protein, 482 aa, synthetic construct
  REGION 1..482: note = human ADA2 R219Q/S262N/K267G, mature numbering
IDETRAHLLLKEKMMRLGGRLVLNTKEELANERLMTLKIAEMKEAMRTLIFPPSMHFFQAKHLIERSQVFNILRMMPKGAALHLHDIGIVTMDWLVRNVTYRPHCHICFTPRGIMQFRFAHPTPRPSEKCSKWILLEDYRKRVQNVTEFDDSLLRNFTLVTQHPEVIYTNQNVVWSKFETIFFTISGLIHYAPVFRDYVFRSMQEFYEDNVLYMEIRAQLLPVYELSGEHHDEEWSVKTYQEVAQKFVETHPEFIGIKIIYNDHRSGDVAVIAESIRMAMGLRIKFPTVVAGFDLVGHEDTGHSLHDYKEALMIPAKDGVKLPYFFHAGETDWQGTSIDRNILDALMLNTTRIGHGFALSKHPAVRTYSWKKDIPIEVCPISNQVLKLVSDLRNHPVATLMATGHPMVISSDDPAMFGAKGLSYDFYEVFMGIGGMKADLRTLKQLAMNSIKYSTLLESEKNTFMEIWKKRWDKFIADVATK

SEQ ID NO: 878 - protein, 482 aa, synthetic construct
  REGION 1..482: note = human ADA2 R219Q/S262N/K267H, mature numbering
IDETRAHLLLKEKMMRLGGRLVLNTKEELANERLMTLKIAEMKEAMRTLIFPPSMHFFQAKHLIERSQVFNILRMMPKGAALHLHDIGIVTMDWLVRNVTYRPHCHICFTPRGIMQFRFAHPTPRPSEKCSKWILLEDYRKRVQNVTEFDDSLLRNFTLVTQHPEVIYTNQNVVWSKFETIFFTISGLIHYAPVFRDYVFRSMQEFYEDNVLYMEIRAQLLPVYELSGEHHDEEWSVKTYQEVAQKFVETHPEFIGIKIIYNDHRSHDVAVIAESIRMAMGLRIKFPTVVAGFDLVGHEDTGHSLHDYKEALMIPAKDGVKLPYFFHAGETDWQGTSIDRNILDALMLNTTRIGHGFALSKHPAVRTYSWKKDIPIEVCPISNQVLKLVSDLRNHPVATLMATGHPMVISSDDPAMFGAKGLSYDFYEVFMGIGGMKADLRTLKQLAMNSIKYSTLLESEKNTFMEIWKKRWDKFIADVATK

SEQ ID NO: 879 - protein, 482 aa, synthetic construct
  REGION 1..482: note = human ADA2 R219Q/S262N/K267I, mature numbering
IDETRAHLLLKEKMMRLGGRLVLNTKEELANERLMTLKIAEMKEAMRTLIFPPSMHFFQAKHLIERSQVFNILRMMPKGAALHLHDIGIVTMDWLVRNVTYRPHCHICFTPRGIMQFRFAHPTPRPSEKCSKWILLEDYRKRVQNVTEFDDSLLRNFTLVTQHPEVIYTNQNVVWSKFETIFFTISGLIHYAPVFRDYVFRSMQEFYEDNVLYMEIRAQLLPVYELSGEHHDEEWSVKTYQEVAQKFVETHPEFIGIKIIYNDHRSIDVAVIAESIRMAMGLRIKFPTVVAGFDLVGHEDTGHSLHDYKEALMIPAKDGVKLPYFFHAGETDWQGTSIDRNILDALMLNTTRIGHGFALSKHPAVRTYSWKKDIPIEVCPISNQVLKLVSDLRNHPVATLMATGHPMVISSDDPAMFGAKGLSYDFYEVFMGIGGMKADLRTLKQLAMNSIKYSTLLESEKNTFMEIWKKRWDKFIADVATK

SEQ ID NO: 880 - protein, 482 aa, synthetic construct
  REGION 1..482: note = human ADA2 R219Q/S262N/K267L, mature numbering
IDETRAHLLLKEKMMRLGGRLVLNTKEELANERLMTLKIAEMKEAMRTLIFPPSMHFFQAKHLIERSQVFNILRMMPKGAALHLHDIGIVTMDWLVRNVTYRPHCHICFTPRGIMQFRFAHPTPRPSEKCSKWILLEDYRKRVQNVTEFDDSLLRNFTLVTQHPEVIYTNQNVVWSKFETIFFTISGLIHYAPVFRDYVFRSMQEFYEDNVLYMEIRAQLLPVYELSGEHHDEEWSVKTYQEVAQKFVETHPEFIGIKIIYNDHRSLDVAVIAESIRMAMGLRIKFPTVVAGFDLVGHEDTGHSLHDYKEALMIPAKDGVKLPYFFHAGETDWQGTSIDRNILDALMLNTTRIGHGFALSKHPAVRTYSWKKDIPIEVCPISNQVLKLVSDLRNHPVATLMATGHPMVISSDDPAMFGAKGLSYDFYEVFMGIGGMKADLRTLKQLAMNSIKYSTLLESEKNTFMEIWKKRWDKFIADVATK

SEQ ID NO: 881 - protein, 482 aa, synthetic construct
  REGION 1..482: note = human ADA2 R219Q/S262N/K267M, mature numbering
IDETRAHLLLKEKMMRLGGRLVLNTKEELANERLMTLKIAEMKEAMRTLIFPPSMHFFQAKHLIERSQVFNILRMMPKGAALHLHDIGIVTMDWLVRNVTYRPHCHICFTPRGIMQFRFAHPTPRPSEKCSKWILLEDYRKRVQNVTEFDDSLLRNFTLVTQHPEVIYTNQNVVWSKFETIFFTISGLIHYAPVFRDYVFRSMQEFYEDNVLYMEIRAQLLPVYELSGEHHDEEWSVKTYQEVAQKFVETHPEFIGIKIIYNDHRSMDVAVIAESIRMAMGLRIKFPTVVAGFDLVGHEDTGHSLHDYKEALMIPAKDGVKLPYFFHAGETDWQGTSIDRNILDALMLNTTRIGHGFALSKHPAVRTYSWKKDIPIEVCPISNQVLKLVSDLRNHPVATLMATGHPMVISSDDPAMFGAKGLSYDFYEVFMGIGGMKADLRTLKQLAMNSIKYSTLLESEKNTFMEIWKKRWDKFIADVATK

SEQ ID NO: 882 - protein, 482 aa, synthetic construct
  REGION 1..482: note = human ADA2 R219Q/S262N/K267N, mature numbering
IDETRAHLLLKEKMMRLGGRLVLNTKEELANERLMTLKIAEMKEAMRTLIFPPSMHFFQAKHLIERSQVFNILRMMPKGAALHLHDIGIVTMDWLVRNVTYRPHCHICFTPRGIMQFRFAHPTPRPSEKCSKWILLEDYRKRVQNVTEFDDSLLRNFTLVTQHPEVIYTNQNVVWSKFETIFFTISGLIHYAPVFRDYVFRSMQEFYEDNVLYMEIRAQLLPVYELSGEHHDEEWSVKTYQEVAQKFVETHPEFIGIKIIYNDHRSNDVAVIAESIRMAMGLRIKFPTVVAGFDLVGHEDTGHSLHDYKEALMIPAKDGVKLPYFFHAGETDWQGTSIDRNILDALMLNTTRIGHGFALSKHPAVRTYSWKKDIPIEVCPISNQVLKLVSDLRNHPVATLMATGHPMVISSDDPAMFGAKGLSYDFYEVFMGIGGMKADLRTLKQLAMNSIKYSTLLESEKNTFMEIWKKRWDKFIADVATK

SEQ ID NO: 883 - protein, 482 aa, synthetic construct
  REGION 1..482: note = human ADA2 R219Q/S262N/K267P, mature numbering
IDETRAHLLLKEKMMRLGGRLVLNTKEELANERLMTLKIAEMKEAMRTLIFPPSMHFFQAKHLIERSQVFNILRMMPKGAALHLHDIGIVTMDWLVRNVTYRPHCHICFTPRGIMQFRFAHPTPRPSEKCSKWILLEDYRKRVQNVTEFDDSLLRNFTLVTQHPEVIYTNQNVVWSKFETIFFTISGLIHYAPVFRDYVFRSMQEFYEDNVLYMEIRAQLLPVYELSGEHHDEEWSVKTYQEVAQKFVETHPEFIGIKIIYNDHRSPDVAVIAESIRMAMGLRIKFPTVVAGFDLVGHEDTGHSLHDYKEALMIPAKDGVKLPYFFHAGETDWQGTSIDRNILDALMLNTTRIGHGFALSKHPAVRTYSWKKDIPIEVCPISNQVLKLVSDLRNHPVATLMATGHPMVISSDDPAMFGAKGLSYDFYEVFMGIGGMKADLRTLKQLAMNSIKYSTLLESEKNTFMEIWKKRWDKFIADVATK

SEQ ID NO: 884 - protein, 482 aa, synthetic construct
  REGION 1..482: note = human ADA2 R219Q/S262N/K267Q, mature numbering
IDETRAHLLLKEKMMRLGGRLVLNTKEELANERLMTLKIAEMKEAMRTLIFPPSMHFFQAKHLIERSQVFNILRMMPKGAALHLHDIGIVTMDWLVRNVTYRPHCHICFTPRGIMQFRFAHPTPRPSEKCSKWILLEDYRKRVQNVTEFDDSLLRNFTLVTQHPEVIYTNQNVVWSKFETIFFTISGLIHYAPVFRDYVFRSMQEFYEDNVLYMEIRAQLLPVYELSGEHHDEEWSVKTYQEVAQKFVETHPEFIGIKIIYNDHRSQDVAVIAESIRMAMGLRIKFPTVVAGFDLVGHEDTGHSLHDYKEALMIPAKDGVKLPYFFHAGETDWQGTSIDRNILDALMLNTTRIGHGFALSKHPAVRTYSWKKDIPIEVCPISNQVLKLVSDLRNHPVATLMATGHPMVISSDDPAMFGAKGLSYDFYEVFMGIGGMKADLRTLKQLAMNSIKYSTLLESEKNTFMEIWKKRWDKFIADVATK

SEQ ID NO: 885 - protein, 482 aa, synthetic construct
  REGION 1..482: note = human ADA2 R219Q/S262N/K267R, mature numbering
IDETRAHLLLKEKMMRLGGRLVLNTKEELANERLMTLKIAEMKEAMRTLIFPPSMHFFQAKHLIERSQVFNILRMMPKGAALHLHDIGIVTMDWLVRNVTYRPHCHICFTPRGIMQFRFAHPTPRPSEKCSKWILLEDYRKRVQNVTEFDDSLLRNFTLVTQHPEVIYTNQNVVWSKFETIFFTISGLIHYAPVFRDYVFRSMQEFYEDNVLYMEIRAQLLPVYELSGEHHDEEWSVKTYQEVAQKFVETHPEFIGIKIIYNDHRSRDVAVIAESIRMAMGLRIKFPTVVAGFDLVGHEDTGHSLHDYKEALMIPAKDGVKLPYFFHAGETDWQGTSIDRNILDALMLNTTRIGHGFALSKHPAVRTYSWKKDIPIEVCPISNQVLKLVSDLRNHPVATLMATGHPMVISSDDPAMFGAKGLSYDFYEVFMGIGGMKADLRTLKQLAMNSIKYSTLLESEKNTFMEIWKKRWDKFIADVATK

SEQ ID NO: 886 - protein, 482 aa, synthetic construct
  REGION 1..482: note = human ADA2 R219Q/S262N/K267S, mature numbering
IDETRAHLLLKEKMMRLGGRLVLNTKEELANERLMTLKIAEMKEAMRTLIFPPSMHFFQAKHLIERSQVFNILRMMPKGAALHLHDIGIVTMDWLVRNVTYRPHCHICFTPRGIMQFRFAHPTPRPSEKCSKWILLEDYRKRVQNVTEFDDSLLRNFTLVTQHPEVIYTNQNVVWSKFETIFFTISGLIHYAPVFRDYVFRSMQEFYEDNVLYMEIRAQLLPVYELSGEHHDEEWSVKTYQEVAQKFVETHPEFIGIKIIYNDHRSSDVAVIAESIRMAMGLRIKFPTVVAGFDLVGHEDTGHSLHDYKEALMIPAKDGVKLPYFFHAGETDWQGTSIDRNILDALMLNTTRIGHGFALSKHPAVRTYSWKKDIPIEVCPISNQVLKLVSDLRNHPVATLMATGHPMVISSDDPAMFGAKGLSYDFYEVFMGIGGMKADLRTLKQLAMNSIKYSTLLESEKNTFMEIWKKRWDKFIADVATK

SEQ ID NO: 887 - protein, 482 aa, synthetic construct
  REGION 1..482: note = human ADA2 R219Q/S262N/K267T, mature numbering
IDETRAHLLLKEKMMRLGGRLVLNTKEELANERLMTLKIAEMKEAMRTLIFPPSMHFFQAKHLIERSQVFNILRMMPKGAALHLHDIGIVTMDWLVRNVTYRPHCHICFTPRGIMQFRFAHPTPRPSEKCSKWILLEDYRKRVQNVTEFDDSLLRNFTLVTQHPEVIYTNQNVVWSKFETIFFTISGLIHYAPVFRDYVFRSMQEFYEDNVLYMEIRAQLLPVYELSGEHHDEEWSVKTYQEVAQKFVETHPEFIGIKIIYNDHRSTDVAVIAESIRMAMGLRIKFPTVVAGFDLVGHEDTGHSLHDYKEALMIPAKDGVKLPYFFHAGETDWQGTSIDRNILDALMLNTTRIGHGFALSKHPAVRTYSWKKDIPIEVCPISNQVLKLVSDLRNHPVATLMATGHPMVISSDDPAMFGAKGLSYDFYEVFMGIGGMKADLRTLKQLAMNSIKYSTLLESEKNTFMEIWKKRWDKFIADVATK

SEQ ID NO: 888 - protein, 482 aa, synthetic construct
  REGION 1..482: note = human ADA2 R219Q/S262N/K267V, mature numbering
IDETRAHLLLKEKMMRLGGRLVLNTKEELANERLMTLKIAEMKEAMRTLIFPPSMHFFQAKHLIERSQVFNILRMMPKGAALHLHDIGIVTMDWLVRNVTYRPHCHICFTPRGIMQFRFAHPTPRPSEKCSKWILLEDYRKRVQNVTEFDDSLLRNFTLVTQHPEVIYTNQNVVWSKFETIFFTISGLIHYAPVFRDYVFRSMQEFYEDNVLYMEIRAQLLPVYELSGEHHDEEWSVKTYQEVAQKFVETHPEFIGIKIIYNDHRSVDVAVIAESIRMAMGLRIKFPTVVAGFDLVGHEDTGHSLHDYKEALMIPAKDGVKLPYFFHAGETDWQGTSIDRNILDALMLNTTRIGHGFALSKHPAVRTYSWKKDIPIEVCPISNQVLKLVSDLRNHPVATLMATGHPMVISSDDPAMFGAKGLSYDFYEVFMGIGGMKADLRTLKQLAMNSIKYSTLLESEKNTFMEIWKKRWDKFIADVATK

SEQ ID NO: 889 - protein, 482 aa, synthetic construct
  REGION 1..482: note = human ADA2 R219Q/S262N/K267W, mature numbering
IDETRAHLLLKEKMMRLGGRLVLNTKEELANERLMTLKIAEMKEAMRTLIFPPSMHFFQAKHLIERSQVFNILRMMPKGAALHLHDIGIVTMDWLVRNVTYRPHCHICFTPRGIMQFRFAHPTPRPSEKCSKWILLEDYRKRVQNVTEFDDSLLRNFTLVTQHPEVIYTNQNVVWSKFETIFFTISGLIHYAPVFRDYVFRSMQEFYEDNVLYMEIRAQLLPVYELSGEHHDEEWSVKTYQEVAQKFVETHPEFIGIKIIYNDHRSWDVAVIAESIRMAMGLRIKFPTVVAGFDLVGHEDTGHSLHDYKEALMIPAKDGVKLPYFFHAGETDWQGTSIDRNILDALMLNTTRIGHGFALSKHPAVRTYSWKKDIPIEVCPISNQVLKLVSDLRNHPVATLMATGHPMVISSDDPAMFGAKGLSYDFYEVFMGIGGMKADLRTLKQLAMNSIKYSTLLESEKNTFMEIWKKRWDKFIADVATK

SEQ ID NO: 890 - protein, 482 aa, synthetic construct
  REGION 1..482: note = human ADA2 R219Q/S262N/K267Y, mature numbering
IDETRAHLLLKEKMMRLGGRLVLNTKEELANERLMTLKIAEMKEAMRTLIFPPSMHFFQAKHLIERSQVFNILRMMPKGAALHLHDIGIVTMDWLVRNVTYRPHCHICFTPRGIMQFRFAHPTPRPSEKCSKWILLEDYRKRVQNVTEFDDSLLRNFTLVTQHPEVIYTNQNVVWSKFETIFFTISGLIHYAPVFRDYVFRSMQEFYEDNVLYMEIRAQLLPVYELSGEHHDEEWSVKTYQEVAQKFVETHPEFIGIKIIYNDHRSYDVAVIAESIRMAMGLRIKFPTVVAGFDLVGHEDTGHSLHDYKEALMIPAKDGVKLPYFFHAGETDWQGTSIDRNILDALMLNTTRIGHGFALSKHPAVRTYSWKKDIPIEVCPISNQVLKLVSDLRNHPVATLMATGHPMVISSDDPAMFGAKGLSYDFYEVFMGIGGMKADLRTLKQLAMNSIKYSTLLESEKNTFMEIWKKRWDKFIADVATK

SEQ ID NO: 891 - protein, 482 aa, synthetic construct
  REGION 1..482: note = human ADA2 R219Q/S262N/V296A, mature numbering
IDETRAHLLLKEKMMRLGGRLVLNTKEELANERLMTLKIAEMKEAMRTLIFPPSMHFFQAKHLIERSQVFNILRMMPKGAALHLHDIGIVTMDWLVRNVTYRPHCHICFTPRGIMQFRFAHPTPRPSEKCSKWILLEDYRKRVQNVTEFDDSLLRNFTLVTQHPEVIYTNQNVVWSKFETIFFTISGLIHYAPVFRDYVFRSMQEFYEDNVLYMEIRAQLLPVYELSGEHHDEEWSVKTYQEVAQKFVETHPEFIGIKIIYNDHRSKDVAVIAESIRMAMGLRIKFPTVVAGFDLAGHEDTGHSLHDYKEALMIPAKDGVKLPYFFHAGETDWQGTSIDRNILDALMLNTTRIGHGFALSKHPAVRTYSWKKDIPIEVCPISNQVLKLVSDLRNHPVATLMATGHPMVISSDDPAMFGAKGLSYDFYEVFMGIGGMKADLRTLKQLAMNSIKYSTLLESEKNTFMEIWKKRWDKFIADVATK

SEQ ID NO: 892 - protein, 482 aa, synthetic construct
  REGION 1..482: note = human ADA2 R219Q/S262N/V296C, mature numbering
IDETRAHLLLKEKMMRLGGRLVLNTKEELANERLMTLKIAEMKEAMRTLIFPPSMHFFQAKHLIERSQVFNILRMMPKGAALHLHDIGIVTMDWLVRNVTYRPHCHICFTPRGIMQFRFAHPTPRPSEKCSKWILLEDYRKRVQNVTEFDDSLLRNFTLVTQHPEVIYTNQNVVWSKFETIFFTISGLIHYAPVFRDYVFRSMQEFYEDNVLYMEIRAQLLPVYELSGEHHDEEWSVKTYQEVAQKFVETHPEFIGIKIIYNDHRSKDVAVIAESIRMAMGLRIKFPTVVAGFDLCGHEDTGHSLHDYKEALMIPAKDGVKLPYFFHAGETDWQGTSIDRNILDALMLNTTRIGHGFALSKHPAVRTYSWKKDIPIEVCPISNQVLKLVSDLRNHPVATLMATGHPMVISSDDPAMFGAKGLSYDFYEVFMGIGGMKADLRTLKQLAMNSIKYSTLLESEKNTFMEIWKKRWDKFIADVATK

SEQ ID NO: 893 - protein, 482 aa, synthetic construct
  REGION 1..482: note = human ADA2 R219Q/S262N/V296D, mature numbering
IDETRAHLLLKEKMMRLGGRLVLNTKEELANERLMTLKIAEMKEAMRTLIFPPSMHFFQAKHLIERSQVFNILRMMPKGAALHLHDIGIVTMDWLVRNVTYRPHCHICFTPRGIMQFRFAHPTPRPSEKCSKWILLEDYRKRVQNVTEFDDSLLRNFTLVTQHPEVIYTNQNVVWSKFETIFFTISGLIHYAPVFRDYVFRSMQEFYEDNVLYMEIRAQLLPVYELSGEHHDEEWSVKTYQEVAQKFVETHPEFIGIKIIYNDHRSKDVAVIAESIRMAMGLRIKFPTVVAGFDLDGHEDTGHSLHDYKEALMIPAKDGVKLPYFFHAGETDWQGTSIDRNILDALMLNTTRIGHGFALSKHPAVRTYSWKKDIPIEVCPISNQVLKLVSDLRNHPVATLMATGHPMVISSDDPAMFGAKGLSYDFYEVFMGIGGMKADLRTLKQLAMNSIKYSTLLESEKNTFMEIWKKRWDKFIADVATK

SEQ ID NO: 894 - protein, 482 aa, synthetic construct
  REGION 1..482: note = human ADA2 R219Q/S262N/V296E, mature numbering
IDETRAHLLLKEKMMRLGGRLVLNTKEELANERLMTLKIAEMKEAMRTLIFPPSMHFFQAKHLIERSQVFNILRMMPKGAALHLHDIGIVTMDWLVRNVTYRPHCHICFTPRGIMQFRFAHPTPRPSEKCSKWILLEDYRKRVQNVTEFDDSLLRNFTLVTQHPEVIYTNQNVVWSKFETIFFTISGLIHYAPVFRDYVFRSMQEFYEDNVLYMEIRAQLLPVYELSGEHHDEEWSVKTYQEVAQKFVETHPEFIGIKIIYNDHRSKDVAVIAESIRMAMGLRIKFPTVVAGFDLEGHEDTGHSLHDYKEALMIPAKDGVKLPYFFHAGETDWQGTSIDRNILDALMLNTTRIGHGFALSKHPAVRTYSWKKDIPIEVCPISNQVLKLVSDLRNHPVATLMATGHPMVISSDDPAMFGAKGLSYDFYEVFMGIGGMKADLRTLKQLAMNSIKYSTLLESEKNTFMEIWKKRWDKFIADVATK

SEQ ID NO: 895 - protein, 482 aa, synthetic construct
  REGION 1..482: note = human ADA2 R219Q/S262N/V296F, mature numbering
IDETRAHLLLKEKMMRLGGRLVLNTKEELANERLMTLKIAEMKEAMRTLIFPPSMHFFQAKHLIERSQVFNILRMMPKGAALHLHDIGIVTMDWLVRNVTYRPHCHICFTPRGIMQFRFAHPTPRPSEKCSKWILLEDYRKRVQNVTEFDDSLLRNFTLVTQHPEVIYTNQNVVWSKFETIFFTISGLIHYAPVFRDYVFRSMQEFYEDNVLYMEIRAQLLPVYELSGEHHDEEWSVKTYQEVAQKFVETHPEFIGIKIIYNDHRSKDVAVIAESIRMAMGLRIKFPTVVAGFDLFGHEDTGHSLHDYKEALMIPAKDGVKLPYFFHAGETDWQGTSIDRNILDALMLNTTRIGHGFALSKHPAVRTYSWKKDIPIEVCPISNQVLKLVSDLRNHPVATLMATGHPMVISSDDPAMFGAKGLSYDFYEVFMGIGGMKADLRTLKQLAMNSIKYSTLLESEKNTFMEIWKKRWDKFIADVATK

SEQ ID NO: 896 - protein, 482 aa, synthetic construct
  REGION 1..482: note = human ADA2 R219Q/S262N/V296G, mature numbering
IDETRAHLLLKEKMMRLGGRLVLNTKEELANERLMTLKIAEMKEAMRTLIFPPSMHFFQAKHLIERSQVFNILRMMPKGAALHLHDIGIVTMDWLVRNVTYRPHCHICFTPRGIMQFRFAHPTPRPSEKCSKWILLEDYRKRVQNVTEFDDSLLRNFTLVTQHPEVIYTNQNVVWSKFETIFFTISGLIHYAPVFRDYVFRSMQEFYEDNVLYMEIRAQLLPVYELSGEHHDEEWSVKTYQEVAQKFVETHPEFIGIKIIYNDHRSKDVAVIAESIRMAMGLRIKFPTVVAGFDLGGHEDTGHSLHDYKEALMIPAKDGVKLPYFFHAGETDWQGTSIDRNILDALMLNTTRIGHGFALSKHPAVRTYSWKKDIPIEVCPISNQVLKLVSDLRNHPVATLMATGHPMVISSDDPAMFGAKGLSYDFYEVFMGIGGMKADLRTLKQLAMNSIKYSTLLESEKNTFMEIWKKRWDKFIADVATK

SEQ ID NO: 897 - protein, 482 aa, synthetic construct
  REGION 1..482: note = human ADA2 R219Q/S262N/V296H, mature numbering
IDETRAHLLLKEKMMRLGGRLVLNTKEELANERLMTLKIAEMKEAMRTLIFPPSMHFFQAKHLIERSQVFNILRMMPKGAALHLHDIGIVTMDWLVRNVTYRPHCHICFTPRGIMQFRFAHPTPRPSEKCSKWILLEDYRKRVQNVTEFDDSLLRNFTLVTQHPEVIYTNQNVVWSKFETIFFTISGLIHYAPVFRDYVFRSMQEFYEDNVLYMEIRAQLLPVYELSGEHHDEEWSVKTYQEVAQKFVETHPEFIGIKIIYNDHRSKDVAVIAESIRMAMGLRIKFPTVVAGFDLHGHEDTGHSLHDYKEALMIPAKDGVKLPYFFHAGETDWQGTSIDRNILDALMLNTTRIGHGFALSKHPAVRTYSWKKDIPIEVCPISNQVLKLVSDLRNHPVATLMATGHPMVISSDDPAMFGAKGLSYDFYEVFMGIGGMKADLRTLKQLAMNSIKYSTLLESEKNTFMEIWKKRWDKFIADVATK

SEQ ID NO: 898 - protein, 482 aa, synthetic construct
  REGION 1..482: note = human ADA2 R219Q/S262N/V296I, mature numbering
IDETRAHLLLKEKMMRLGGRLVLNTKEELANERLMTLKIAEMKEAMRTLIFPPSMHFFQAKHLIERSQVFNILRMMPKGAALHLHDIGIVTMDWLVRNVTYRPHCHICFTPRGIMQFRFAHPTPRPSEKCSKWILLEDYRKRVQNVTEFDDSLLRNFTLVTQHPEVIYTNQNVVWSKFETIFFTISGLIHYAPVFRDYVFRSMQEFYEDNVLYMEIRAQLLPVYELSGEHHDEEWSVKTYQEVAQKFVETHPEFIGIKIIYNDHRSKDVAVIAESIRMAMGLRIKFPTVVAGFDLIGHEDTGHSLHDYKEALMIPAKDGVKLPYFFHAGETDWQGTSIDRNILDALMLNTTRIGHGFALSKHPAVRTYSWKKDIPIEVCPISNQVLKLVSDLRNHPVATLMATGHPMVISSDDPAMFGAKGLSYDFYEVFMGIGGMKADLRTLKQLAMNSIKYSTLLESEKNTFMEIWKKRWDKFIADVATK

SEQ ID NO: 899 - protein, 482 aa, synthetic construct
  REGION 1..482: note = human ADA2 R219Q/S262N/V296K, mature numbering
IDETRAHLLLKEKMMRLGGRLVLNTKEELANERLMTLKIAEMKEAMRTLIFPPSMHFFQAKHLIERSQVFNILRMMPKGAALHLHDIGIVTMDWLVRNVTYRPHCHICFTPRGIMQFRFAHPTPRPSEKCSKWILLEDYRKRVQNVTEFDDSLLRNFTLVTQHPEVIYTNQNVVWSKFETIFFTISGLIHYAPVFRDYVFRSMQEFYEDNVLYMEIRAQLLPVYELSGEHHDEEWSVKTYQEVAQKFVETHPEFIGIKIIYNDHRSKDVAVIAESIRMAMGLRIKFPTVVAGFDLKGHEDTGHSLHDYKEALMIPAKDGVKLPYFFHAGETDWQGTSIDRNILDALMLNTTRIGHGFALSKHPAVRTYSWKKDIPIEVCPISNQVLKLVSDLRNHPVATLMATGHPMVISSDDPAMFGAKGLSYDFYEVFMGIGGMKADLRTLKQLAMNSIKYSTLLESEKNTFMEIWKKRWDKFIADVATK

SEQ ID NO: 900 - protein, 482 aa, synthetic construct
  REGION 1..482: note = human ADA2 R219Q/S262N/V296L, mature numbering
IDETRAHLLLKEKMMRLGGRLVLNTKEELANERLMTLKIAEMKEAMRTLIFPPSMHFFQAKHLIERSQVFNILRMMPKGAALHLHDIGIVTMDWLVRNVTYRPHCHICFTPRGIMQFRFAHPTPRPSEKCSKWILLEDYRKRVQNVTEFDDSLLRNFTLVTQHPEVIYTNQNVVWSKFETIFFTISGLIHYAPVFRDYVFRSMQEFYEDNVLYMEIRAQLLPVYELSGEHHDEEWSVKTYQEVAQKFVETHPEFIGIKIIYNDHRSKDVAVIAESIRMAMGLRIKFPTVVAGFDLLGHEDTGHSLHDYKEALMIPAKDGVKLPYFFHAGETDWQGTSIDRNILDALMLNTTRIGHGFALSKHPAVRTYSWKKDIPIEVCPISNQVLKLVSDLRNHPVATLMATGHPMVISSDDPAMFGAKGLSYDFYEVFMGIGGMKADLRTLKQLAMNSIKYSTLLESEKNTFMEIWKKRWDKFIADVATK

SEQ ID NO: 901 - protein, 482 aa, synthetic construct
  REGION 1..482: note = human ADA2 R219Q/S262N/V296M, mature numbering
IDETRAHLLLKEKMMRLGGRLVLNTKEELANERLMTLKIAEMKEAMRTLIFPPSMHFFQAKHLIERSQVFNILRMMPKGAALHLHDIGIVTMDWLVRNVTYRPHCHICFTPRGIMQFRFAHPTPRPSEKCSKWILLEDYRKRVQNVTEFDDSLLRNFTLVTQHPEVIYTNQNVVWSKFETIFFTISGLIHYAPVFRDYVFRSMQEFYEDNVLYMEIRAQLLPVYELSGEHHDEEWSVKTYQEVAQKFVETHPEFIGIKIIYNDHRSKDVAVIAESIRMAMGLRIKFPTVVAGFDLMGHEDTGHSLHDYKEALMIPAKDGVKLPYFFHAGETDWQGTSIDRNILDALMLNTTRIGHGFALSKHPAVRTYSWKKDIPIEVCPISNQVLKLVSDLRNHPVATLMATGHPMVISSDDPAMFGAKGLSYDFYEVFMGIGGMKADLRTLKQLAMNSIKYSTLLESEKNTFMEIWKKRWDKFIADVATK

SEQ ID NO: 902 - protein, 482 aa, synthetic construct
  REGION 1..482: note = human ADA2 R219Q/S262N/V296N, mature numbering
IDETRAHLLLKEKMMRLGGRLVLNTKEELANERLMTLKIAEMKEAMRTLIFPPSMHFFQAKHLIERSQVFNILRMMPKGAALHLHDIGIVTMDWLVRNVTYRPHCHICFTPRGIMQFRFAHPTPRPSEKCSKWILLEDYRKRVQNVTEFDDSLLRNFTLVTQHPEVIYTNQNVVWSKFETIFFTISGLIHYAPVFRDYVFRSMQEFYEDNVLYMEIRAQLLPVYELSGEHHDEEWSVKTYQEVAQKFVETHPEFIGIKIIYNDHRSKDVAVIAESIRMAMGLRIKFPTVVAGFDLNGHEDTGHSLHDYKEALMIPAKDGVKLPYFFHAGETDWQGTSIDRNILDALMLNTTRIGHGFALSKHPAVRTYSWKKDIPIEVCPISNQVLKLVSDLRNHPVATLMATGHPMVISSDDPAMFGAKGLSYDFYEVFMGIGGMKADLRTLKQLAMNSIKYSTLLESEKNTFMEIWKKRWDKFIADVATK

SEQ ID NO: 903 - protein, 482 aa, synthetic construct
  REGION 1..482: note = human ADA2 R219Q/S262N/V296P, mature numbering
IDETRAHLLLKEKMMRLGGRLVLNTKEELANERLMTLKIAEMKEAMRTLIFPPSMHFFQAKHLIERSQVFNILRMMPKGAALHLHDIGIVTMDWLVRNVTYRPHCHICFTPRGIMQFRFAHPTPRPSEKCSKWILLEDYRKRVQNVTEFDDSLLRNFTLVTQHPEVIYTNQNVVWSKFETIFFTISGLIHYAPVFRDYVFRSMQEFYEDNVLYMEIRAQLLPVYELSGEHHDEEWSVKTYQEVAQKFVETHPEFIGIKIIYNDHRSKDVAVIAESIRMAMGLRIKFPTVVAGFDLPGHEDTGHSLHDYKEALMIPAKDGVKLPYFFHAGETDWQGTSIDRNILDALMLNTTRIGHGFALSKHPAVRTYSWKKDIPIEVCPISNQVLKLVSDLRNHPVATLMATGHPMVISSDDPAMFGAKGLSYDFYEVFMGIGGMKADLRTLKQLAMNSIKYSTLLESEKNTFMEIWKKRWDKFIADVATK

SEQ ID NO: 904 - protein, 482 aa, synthetic construct
  REGION 1..482: note = human ADA2 R219Q/S262N/V296Q, mature numbering
IDETRAHLLLKEKMMRLGGRLVLNTKEELANERLMTLKIAEMKEAMRTLIFPPSMHFFQAKHLIERSQVFNILRMMPKGAALHLHDIGIVTMDWLVRNVTYRPHCHICFTPRGIMQFRFAHPTPRPSEKCSKWILLEDYRKRVQNVTEFDDSLLRNFTLVTQHPEVIYTNQNVVWSKFETIFFTISGLIHYAPVFRDYVFRSMQEFYEDNVLYMEIRAQLLPVYELSGEHHDEEWSVKTYQEVAQKFVETHPEFIGIKIIYNDHRSKDVAVIAESIRMAMGLRIKFPTVVAGFDLQGHEDTGHSLHDYKEALMIPAKDGVKLPYFFHAGETDWQGTSIDRNILDALMLNTTRIGHGFALSKHPAVRTYSWKKDIPIEVCPISNQVLKLVSDLRNHPVATLMATGHPMVISSDDPAMFGAKGLSYDFYEVFMGIGGMKADLRTLKQLAMNSIKYSTLLESEKNTFMEIWKKRWDKFIADVATK

SEQ ID NO: 905 - protein, 482 aa, synthetic construct
  REGION 1..482: note = human ADA2 R219Q/S262N/V296R, mature numbering
IDETRAHLLLKEKMMRLGGRLVLNTKEELANERLMTLKIAEMKEAMRTLIFPPSMHFFQAKHLIERSQVFNILRMMPKGAALHLHDIGIVTMDWLVRNVTYRPHCHICFTPRGIMQFRFAHPTPRPSEKCSKWILLEDYRKRVQNVTEFDDSLLRNFTLVTQHPEVIYTNQNVVWSKFETIFFTISGLIHYAPVFRDYVFRSMQEFYEDNVLYMEIRAQLLPVYELSGEHHDEEWSVKTYQEVAQKFVETHPEFIGIKIIYNDHRSKDVAVIAESIRMAMGLRIKFPTVVAGFDLRGHEDTGHSLHDYKEALMIPAKDGVKLPYFFHAGETDWQGTSIDRNILDALMLNTTRIGHGFALSKHPAVRTYSWKKDIPIEVCPISNQVLKLVSDLRNHPVATLMATGHPMVISSDDPAMFGAKGLSYDFYEVFMGIGGMKADLRTLKQLAMNSIKYSTLLESEKNTFMEIWKKRWDKFIADVATK

SEQ ID NO: 906 - protein, 482 aa, synthetic construct
  REGION 1..482: note = human ADA2 R219Q/S262N/V296S, mature numbering
IDETRAHLLLKEKMMRLGGRLVLNTKEELANERLMTLKIAEMKEAMRTLIFPPSMHFFQAKHLIERSQVFNILRMMPKGAALHLHDIGIVTMDWLVRNVTYRPHCHICFTPRGIMQFRFAHPTPRPSEKCSKWILLEDYRKRVQNVTEFDDSLLRNFTLVTQHPEVIYTNQNVVWSKFETIFFTISGLIHYAPVFRDYVFRSMQEFYEDNVLYMEIRAQLLPVYELSGEHHDEEWSVKTYQEVAQKFVETHPEFIGIKIIYNDHRSKDVAVIAESIRMAMGLRIKFPTVVAGFDLSGHEDTGHSLHDYKEALMIPAKDGVKLPYFFHAGETDWQGTSIDRNILDALMLNTTRIGHGFALSKHPAVRTYSWKKDIPIEVCPISNQVLKLVSDLRNHPVATLMATGHPMVISSDDPAMFGAKGLSYDFYEVFMGIGGMKADLRTLKQLAMNSIKYSTLLESEKNTFMEIWKKRWDKFIADVATK

SEQ ID NO: 907 - protein, 482 aa, synthetic construct
  REGION 1..482: note = human ADA2 R219Q/S262N/V296T, mature numbering
IDETRAHLLLKEKMMRLGGRLVLNTKEELANERLMTLKIAEMKEAMRTLIFPPSMHFFQAKHLIERSQVFNILRMMPKGAALHLHDIGIVTMDWLVRNVTYRPHCHICFTPRGIMQFRFAHPTPRPSEKCSKWILLEDYRKRVQNVTEFDDSLLRNFTLVTQHPEVIYTNQNVVWSKFETIFFTISGLIHYAPVFRDYVFRSMQEFYEDNVLYMEIRAQLLPVYELSGEHHDEEWSVKTYQEVAQKFVETHPEFIGIKIIYNDHRSKDVAVIAESIRMAMGLRIKFPTVVAGFDLTGHEDTGHSLHDYKEALMIPAKDGVKLPYFFHAGETDWQGTSIDRNILDALMLNTTRIGHGFALSKHPAVRTYSWKKDIPIEVCPISNQVLKLVSDLRNHPVATLMATGHPMVISSDDPAMFGAKGLSYDFYEVFMGIGGMKADLRTLKQLAMNSIKYSTLLESEKNTFMEIWKKRWDKFIADVATK

SEQ ID NO: 908 - protein, 482 aa, synthetic construct
  REGION 1..482: note = human ADA2 R219Q/S262N/V296W, mature numbering
IDETRAHLLLKEKMMRLGGRLVLNTKEELANERLMTLKIAEMKEAMRTLIFPPSMHFFQAKHLIERSQVFNILRMMPKGAALHLHDIGIVTMDWLVRNVTYRPHCHICFTPRGIMQFRFAHPTPRPSEKCSKWILLEDYRKRVQNVTEFDDSLLRNFTLVTQHPEVIYTNQNVVWSKFETIFFTISGLIHYAPVFRDYVFRSMQEFYEDNVLYMEIRAQLLPVYELSGEHHDEEWSVKTYQEVAQKFVETHPEFIGIKIIYNDHRSKDVAVIAESIRMAMGLRIKFPTVVAGFDLWGHEDTGHSLHDYKEALMIPAKDGVKLPYFFHAGETDWQGTSIDRNILDALMLNTTRIGHGFALSKHPAVRTYSWKKDIPIEVCPISNQVLKLVSDLRNHPVATLMATGHPMVISSDDPAMFGAKGLSYDFYEVFMGIGGMKADLRTLKQLAMNSIKYSTLLESEKNTFMEIWKKRWDKFIADVATK

SEQ ID NO: 909 - protein, 482 aa, synthetic construct
  REGION 1..482: note = human ADA2 R219Q/S262N/V296Y, mature numbering
IDETRAHLLLKEKMMRLGGRLVLNTKEELANERLMTLKIAEMKEAMRTLIFPPSMHFFQAKHLIERSQVFNILRMMPKGAALHLHDIGIVTMDWLVRNVTYRPHCHICFTPRGIMQFRFAHPTPRPSEKCSKWILLEDYRKRVQNVTEFDDSLLRNFTLVTQHPEVIYTNQNVVWSKFETIFFTISGLIHYAPVFRDYVFRSMQEFYEDNVLYMEIRAQLLPVYELSGEHHDEEWSVKTYQEVAQKFVETHPEFIGIKIIYNDHRSKDVAVIAESIRMAMGLRIKFPTVVAGFDLYGHEDTGHSLHDYKEALMIPAKDGVKLPYFFHAGETDWQGTSIDRNILDALMLNTTRIGHGFALSKHPAVRTYSWKKDIPIEVCPISNQVLKLVSDLRNHPVATLMATGHPMVISSDDPAMFGAKGLSYDFYEVFMGIGGMKADLRTLKQLAMNSIKYSTLLESEKNTFMEIWKKRWDKFIADVATK

SEQ ID NO: 910 - protein, 482 aa, synthetic construct
  REGION 1..482: note = human ADA2 R219Q/K11A/R20A, mature numbering
IDETRAHLLLAEKMMRLGGALVLNTKEELANERLMTLKIAEMKEAMRTLIFPPSMHFFQAKHLIERSQVFNILRMMPKGAALHLHDIGIVTMDWLVRNVTYRPHCHICFTPRGIMQFRFAHPTPRPSEKCSKWILLEDYRKRVQNVTEFDDSLLRNFTLVTQHPEVIYTNQNVVWSKFETIFFTISGLIHYAPVFRDYVFRSMQEFYEDNVLYMEIRAQLLPVYELSGEHHDEEWSVKTYQEVAQKFVETHPEFIGIKIIYSDHRSKDVAVIAESIRMAMGLRIKFPTVVAGFDLVGHEDTGHSLHDYKEALMIPAKDGVKLPYFFHAGETDWQGTSIDRNILDALMLNTTRIGHGFALSKHPAVRTYSWKKDIPIEVCPISNQVLKLVSDLRNHPVATLMATGHPMVISSDDPAMFGAKGLSYDFYEVFMGIGGMKADLRTLKQLAMNSIKYSTLLESEKNTFMEIWKKRWDKFIADVATK

SEQ ID NO: 911 - protein, 482 aa, synthetic construct
  REGION 1..482: note = human ADA2 R219Q/K11A/R20A/K371A, mature numbering
IDETRAHLLLAEKMMRLGGALVLNTKEELANERLMTLKIAEMKEAMRTLIFPPSMHFFQAKHLIERSQVFNILRMMPKGAALHLHDIGIVTMDWLVRNVTYRPHCHICFTPRGIMQFRFAHPTPRPSEKCSKWILLEDYRKRVQNVTEFDDSLLRNFTLVTQHPEVIYTNQNVVWSKFETIFFTISGLIHYAPVFRDYVFRSMQEFYEDNVLYMEIRAQLLPVYELSGEHHDEEWSVKTYQEVAQKFVETHPEFIGIKIIYSDHRSKDVAVIAESIRMAMGLRIKFPTVVAGFDLVGHEDTGHSLHDYKEALMIPAKDGVKLPYFFHAGETDWQGTSIDRNILDALMLNTTRIGHGFALSKHPAVRTYSWAKDIPIEVCPISNQVLKLVSDLRNHPVATLMATGHPMVISSDDPAMFGAKGLSYDFYEVFMGIGGMKADLRTLKQLAMNSIKYSTLLESEKNTFMEIWKKRWDKFIADVATK

SEQ ID NO: 912 - protein, 482 aa, synthetic construct
  REGION 1..482: note = human ADA2 R219Q/R20A/K371A, mature numbering
IDETRAHLLLKEKMMRLGGALVLNTKEELANERLMTLKIAEMKEAMRTLIFPPSMHFFQAKHLIERSQVFNILRMMPKGAALHLHDIGIVTMDWLVRNVTYRPHCHICFTPRGIMQFRFAHPTPRPSEKCSKWILLEDYRKRVQNVTEFDDSLLRNFTLVTQHPEVIYTNQNVVWSKFETIFFTISGLIHYAPVFRDYVFRSMQEFYEDNVLYMEIRAQLLPVYELSGEHHDEEWSVKTYQEVAQKFVETHPEFIGIKIIYSDHRSKDVAVIAESIRMAMGLRIKFPTVVAGFDLVGHEDTGHSLHDYKEALMIPAKDGVKLPYFFHAGETDWQGTSIDRNILDALMLNTTRIGHGFALSKHPAVRTYSWAKDIPIEVCPISNQVLKLVSDLRNHPVATLMATGHPMVISSDDPAMFGAKGLSYDFYEVFMGIGGMKADLRTLKQLAMNSIKYSTLLESEKNTFMEIWKKRWDKFIADVATK

SEQ ID NO: 913 - protein, 482 aa, synthetic construct
  REGION 1..482: note = human ADA2 R219Q/K11A/K371A, mature numbering
IDETRAHLLLAEKMMRLGGRLVLNTKEELANERLMTLKIAEMKEAMRTLIFPPSMHFFQAKHLIERSQVFNILRMMPKGAALHLHDIGIVTMDWLVRNVTYRPHCHICFTPRGIMQFRFAHPTPRPSEKCSKWILLEDYRKRVQNVTEFDDSLLRNFTLVTQHPEVIYTNQNVVWSKFETIFFTISGLIHYAPVFRDYVFRSMQEFYEDNVLYMEIRAQLLPVYELSGEHHDEEWSVKTYQEVAQKFVETHPEFIGIKIIYSDHRSKDVAVIAESIRMAMGLRIKFPTVVAGFDLVGHEDTGHSLHDYKEALMIPAKDGVKLPYFFHAGETDWQGTSIDRNILDALMLNTTRIGHGFALSKHPAVRTYSWAKDIPIEVCPISNQVLKLVSDLRNHPVATLMATGHPMVISSDDPAMFGAKGLSYDFYEVFMGIGGMKADLRTLKQLAMNSIKYSTLLESEKNTFMEIWKKRWDKFIADVATK

SEQ ID NO: 914 - protein, 482 aa, synthetic construct
  REGION 1..482: note = human ADA2 S262N/K11A/R20A, mature numbering
IDETRAHLLLAEKMMRLGGALVLNTKEELANERLMTLKIAEMKEAMRTLIFPPSMHFFQAKHLIERSQVFNILRMMPKGAALHLHDIGIVTMDWLVRNVTYRPHCHICFTPRGIMQFRFAHPTPRPSEKCSKWILLEDYRKRVQNVTEFDDSLLRNFTLVTQHPEVIYTNQNVVWSKFETIFFTISGLIHYAPVFRDYVFRSMQEFYEDNVLYMEIRARLLPVYELSGEHHDEEWSVKTYQEVAQKFVETHPEFIGIKIIYNDHRSKDVAVIAESIRMAMGLRIKFPTVVAGFDLVGHEDTGHSLHDYKEALMIPAKDGVKLPYFFHAGETDWQGTSIDRNILDALMLNTTRIGHGFALSKHPAVRTYSWKKDIPIEVCPISNQVLKLVSDLRNHPVATLMATGHPMVISSDDPAMFGAKGLSYDFYEVFMGIGGMKADLRTLKQLAMNSIKYSTLLESEKNTFMEIWKKRWDKFIADVATK

SEQ ID NO: 915 - protein, 482 aa, synthetic construct
  REGION 1..482: note = human ADA2 S262N/K11A/R20A/K371A, mature numbering
IDETRAHLLLAEKMMRLGGALVLNTKEELANERLMTLKIAEMKEAMRTLIFPPSMHFFQAKHLIERSQVFNILRMMPKGAALHLHDIGIVTMDWLVRNVTYRPHCHICFTPRGIMQFRFAHPTPRPSEKCSKWILLEDYRKRVQNVTEFDDSLLRNFTLVTQHPEVIYTNQNVVWSKFETIFFTISGLIHYAPVFRDYVFRSMQEFYEDNVLYMEIRARLLPVYELSGEHHDEEWSVKTYQEVAQKFVETHPEFIGIKIIYNDHRSKDVAVIAESIRMAMGLRIKFPTVVAGFDLVGHEDTGHSLHDYKEALMIPAKDGVKLPYFFHAGETDWQGTSIDRNILDALMLNTTRIGHGFALSKHPAVRTYSWAKDIPIEVCPISNQVLKLVSDLRNHPVATLMATGHPMVISSDDPAMFGAKGLSYDFYEVFMGIGGMKADLRTLKQLAMNSIKYSTLLESEKNTFMEIWKKRWDKFIADVATK

SEQ ID NO: 916 - protein, 482 aa, synthetic construct
  REGION 1..482: note = human ADA2 S262N/R20A/K371A, mature numbering
IDETRAHLLLKEKMMRLGGALVLNTKEELANERLMTLKIAEMKEAMRTLIFPPSMHFFQAKHLIERSQVFNILRMMPKGAALHLHDIGIVTMDWLVRNVTYRPHCHICFTPRGIMQFRFAHPTPRPSEKCSKWILLEDYRKRVQNVTEFDDSLLRNFTLVTQHPEVIYTNQNVVWSKFETIFFTISGLIHYAPVFRDYVFRSMQEFYEDNVLYMEIRARLLPVYELSGEHHDEEWSVKTYQEVAQKFVETHPEFIGIKIIYNDHRSKDVAVIAESIRMAMGLRIKFPTVVAGFDLVGHEDTGHSLHDYKEALMIPAKDGVKLPYFFHAGETDWQGTSIDRNILDALMLNTTRIGHGFALSKHPAVRTYSWAKDIPIEVCPISNQVLKLVSDLRNHPVATLMATGHPMVISSDDPAMFGAKGLSYDFYEVFMGIGGMKADLRTLKQLAMNSIKYSTLLESEKNTFMEIWKKRWDKFIADVATK

SEQ ID NO: 917 - protein, 482 aa, synthetic construct
  REGION 1..482: note = human ADA2 S262N/K11A/K371A, mature numbering
IDETRAHLLLAEKMMRLGGRLVLNTKEELANERLMTLKIAEMKEAMRTLIFPPSMHFFQAKHLIERSQVFNILRMMPKGAALHLHDIGIVTMDWLVRNVTYRPHCHICFTPRGIMQFRFAHPTPRPSEKCSKWILLEDYRKRVQNVTEFDDSLLRNFTLVTQHPEVIYTNQNVVWSKFETIFFTISGLIHYAPVFRDYVFRSMQEFYEDNVLYMEIRARLLPVYELSGEHHDEEWSVKTYQEVAQKFVETHPEFIGIKIIYNDHRSKDVAVIAESIRMAMGLRIKFPTVVAGFDLVGHEDTGHSLHDYKEALMIPAKDGVKLPYFFHAGETDWQGTSIDRNILDALMLNTTRIGHGFALSKHPAVRTYSWAKDIPIEVCPISNQVLKLVSDLRNHPVATLMATGHPMVISSDDPAMFGAKGLSYDFYEVFMGIGGMKADLRTLKQLAMNSIKYSTLLESEKNTFMEIWKKRWDKFIADVATK

SEQ ID NO: 918 - protein, 440 aa, synthetic construct
  REGION 1..440: note = human ADA2 R219Q/C105-T147del->(Gly)n, maturenumbering,where n = 2 to 20
  REPEAT 105: note = occurring 2, 3, 4, 5, 6, 7, 8, 9, 10, 11, 12, 13,14, 15, 16, 17, 18, 19 or 20 times
IDETRAHLLLKEKMMRLGGRLVLNTKEELANERLMTLKIAEMKEAMRTLIFPPSMHFFQAKHLIERSQVFNILRMMPKGAALHLHDIGIVTMDWLVRNVTYRPHGEFDDSLLRNFTLVTQHPEVIYTNQNVVWSKFETIFFTISGLIHYAPVFRDYVFRSMQEFYEDNVLYMEIRAQLLPVYELSGEHHDEEWSVKTYQEVAQKFVETHPEFIGIKIIYSDHRSKDVAVIAESIRMAMGLRIKFPTVVAGFDLVGHEDTGHSLHDYKEALMIPAKDGVKLPYFFHAGETDWQGTSIDRNILDALMLNTTRIGHGFALSKHPAVRTYSWKKDIPIEVCPISNQVLKLVSDLRNHPVATLMATGHPMVISSDDPAMFGAKGLSYDFYEVFMGIGGMKADLRTLKQLAMNSIKYSTLLESEKNTFMEIWKKRWDKFIADVATK

SEQ ID NO: 919 - protein, 441 aa, synthetic construct
  REGION 1..441: note = human ADA2 R219Q/V99-Q144del->(GGGGS)n, maturenumbering, where n = 1 to 5
  REPEAT 99..103: note = occurring 1, 2, 3, 4 or 5 times
IDETRAHLLLKEKMMRLGGRLVLNTKEELANERLMTLKIAEMKEAMRTLIFPPSMHFFQAKHLIERSQVFNILRMMPKGAALHLHDIGIVTMDWLVRNGGGGSNVTEFDDSLLRNFTLVTQHPEVIYTNQNVVWSKFETIFFTISGLIHYAPVFRDYVFRSMQEFYEDNVLYMEIRAQLLPVYELSGEHHDEEWSVKTYQEVAQKFVETHPEFIGIKIIYSDHRSKDVAVIAESIRMAMGLRIKFPTVVAGFDLVGHEDTGHSLHDYKEALMIPAKDGVKLPYFFHAGETDWQGTSIDRNILDALMLNTTRIGHGFALSKHPAVRTYSWKKDIPIEVCPISNQVLKLVSDLRNHPVATLMATGHPMVISSDDPAMFGAKGLSYDFYEVFMGIGGMKADLRTLKQLAMNSIKYSTLLESEKNTFMEIWKKRWDKFIADVATK

SEQ ID NO: 920 - protein, 444 aa, synthetic construct
  REGION 1..444: note = human ADA2 R219Q/C105-T147del->(GGGGS)n, maturenumbering, where n = 1 to 5
  REPEAT 105..109: note = occurring 1, 2, 3, 4 or 5 times
IDETRAHLLLKEKMMRLGGRLVLNTKEELANERLMTLKIAEMKEAMRTLIFPPSMHFFQAKHLIERSQVFNILRMMPKGAALHLHDIGIVTMDWLVRNVTYRPHGGGGSEFDDSLLRNFTLVTQHPEVIYTNQNVVWSKFETIFFTISGLIHYAPVFRDYVFRSMQEFYEDNVLYMEIRAQLLPVYELSGEHHDEEWSVKTYQEVAQKFVETHPEFIGIKIIYSDHRSKDVAVIAESIRMAMGLRIKFPTVVAGFDLVGHEDTGHSLHDYKEALMIPAKDGVKLPYFFHAGETDWQGTSIDRNILDALMLNTTRIGHGFALSKHPAVRTYSWKKDIPIEVCPISNQVLKLVSDLRNHPVATLMATGHPMVISSDDPAMFGAKGLSYDFYEVFMGIGGMKADLRTLKQLAMNSIKYSTLLESEKNTFMEIWKKRWDKFIADVATK

SEQ ID NO: 921 - protein, 423 aa, synthetic construct
  REGION 1..423: note = human ADA2 R219Q/N98-N156Del, mature numbering
IDETRAHLLLKEKMMRLGGRLVLNTKEELANERLMTLKIAEMKEAMRTLIFPPSMHFFQAKHLIERSQVFNILRMMPKGAALHLHDIGIVTMDWLVRFTLVTQHPEVIYTNQNVVWSKFETIFFTISGLIHYAPVFRDYVFRSMQEFYEDNVLYMEIRAQLLPVYELSGEHHDEEWSVKTYQEVAQKFVETHPEFIGIKIIYSDHRSKDVAVIAESIRMAMGLRIKFPTVVAGFDLVGHEDTGHSLHDYKEALMIPAKDGVKLPYFFHAGETDWQGTSIDRNILDALMLNTTRIGHGFALSKHPAVRTYSWKKDIPIEVCPISNQVLKLVSDLRNHPVATLMATGHPMVISSDDPAMFGAKGLSYDFYEVFMGIGGMKADLRTLKQLAMNSIKYSTLLESEKNTFMEIWKKRWDKFIADVATK

SEQ ID NO: 922 - protein, 438 aa, synthetic construct
  REGION 1..438: note = human ADA2 R219Q/C105-E148Del, mature numbering
IDETRAHLLLKEKMMRLGGRLVLNTKEELANERLMTLKIAEMKEAMRTLIFPPSMHFFQAKHLIERSQVFNILRMMPKGAALHLHDIGIVTMDWLVRNVTYRPHFDDSLLRNFTLVTQHPEVIYTNQNVVWSKFETIFFTISGLIHYAPVFRDYVFRSMQEFYEDNVLYMEIRAQLLPVYELSGEHHDEEWSVKTYQEVAQKFVETHPEFIGIKIIYSDHRSKDVAVIAESIRMAMGLRIKFPTVVAGFDLVGHEDTGHSLHDYKEALMIPAKDGVKLPYFFHAGETDWQGTSIDRNILDALMLNTTRIGHGFALSKHPAVRTYSWKKDIPIEVCPISNQVLKLVSDLRNHPVATLMATGHPMVISSDDPAMFGAKGLSYDFYEVFMGIGGMKADLRTLKQLAMNSIKYSTLLESEKNTFMEIWKKRWDKFIADVATK

SEQ ID NO: 923 - protein, 439 aa, synthetic construct
  REGION 1..439: note = human ADA2 R219Q/C105-T147Del, mature numbering
IDETRAHLLLKEKMMRLGGRLVLNTKEELANERLMTLKIAEMKEAMRTLIFPPSMHFFQAKHLIERSQVFNILRMMPKGAALHLHDIGIVTMDWLVRNVTYRPHEFDDSLLRNFTLVTQHPEVIYTNQNVVWSKFETIFFTISGLIHYAPVFRDYVFRSMQEFYEDNVLYMEIRAQLLPVYELSGEHHDEEWSVKTYQEVAQKFVETHPEFIGIKIIYSDHRSKDVAVIAESIRMAMGLRIKFPTVVAGFDLVGHEDTGHSLHDYKEALMIPAKDGVKLPYFFHAGETDWQGTSIDRNILDALMLNTTRIGHGFALSKHPAVRTYSWKKDIPIEVCPISNQVLKLVSDLRNHPVATLMATGHPMVISSDDPAMFGAKGLSYDFYEVFMGIGGMKADLRTLKQLAMNSIKYSTLLESEKNTFMEIWKKRWDKFIADVATK

SEQ ID NO: 924 - protein, 436 aa, synthetic construct
  REGION 1..436: note = human ADA2 R219Q/V99-Q144del, mature numbering
IDETRAHLLLKEKMMRLGGRLVLNTKEELANERLMTLKIAEMKEAMRTLIFPPSMHFFQAKHLIERSQVFNILRMMPKGAALHLHDIGIVTMDWLVRNNVTEFDDSLLRNFTLVTQHPEVIYTNQNVVWSKFETIFFTISGLIHYAPVFRDYVFRSMQEFYEDNVLYMEIRAQLLPVYELSGEHHDEEWSVKTYQEVAQKFVETHPEFIGIKIIYSDHRSKDVAVIAESIRMAMGLRIKFPTVVAGFDLVGHEDTGHSLHDYKEALMIPAKDGVKLPYFFHAGETDWQGTSIDRNILDALMLNTTRIGHGFALSKHPAVRTYSWKKDIPIEVCPISNQVLKLVSDLRNHPVATLMATGHPMVISSDDPAMFGAKGLSYDFYEVFMGIGGMKADLRTLKQLAMNSIKYSTLLESEKNTFMEIWKKRWDKFIADVATK

SEQ ID NO: 925 - protein, 440 aa, synthetic construct
  REGION 1..440: note = human ADA2 S262N/C105-T147del->(Gly)n, maturenumbering, where n = 2 to 20
  REPEAT 105: note = occurring 2, 3, 4, 5, 6, 7, 8, 9, 10, 11, 12, 13,14, 15, 16, 17, 18, 19 or 20 times
IDETRAHLLLKEKMMRLGGRLVLNTKEELANERLMTLKIAEMKEAMRTLIFPPSMHFFQAKHLIERSQVFNILRMMPKGAALHLHDIGIVTMDWLVRNVTYRPHGEFDDSLLRNFTLVTQHPEVIYTNQNVVWSKFETIFFTISGLIHYAPVFRDYVFRSMQEFYEDNVLYMEIRARLLPVYELSGEHHDEEWSVKTYQEVAQKFVETHPEFIGIKIIYNDHRSKDVAVIAESIRMAMGLRIKFPTVVAGFDLVGHEDTGHSLHDYKEALMIPAKDGVKLPYFFHAGETDWQGTSIDRNILDALMLNTTRIGHGFALSKHPAVRTYSWKKDIPIEVCPISNQVLKLVSDLRNHPVATLMATGHPMVISSDDPAMFGAKGLSYDFYEVFMGIGGMKADLRTLKQLAMNSIKYSTLLESEKNTFMEIWKKRWDKFIADVATK

SEQ ID NO: 926 - protein, 441 aa, synthetic construct
  REGION 1..441: note = human ADA2 S262N/V99-Q144del->(GGGGS)n, maturenumbering, where n = 1 to 5
  REPEAT 99..103: note = occurring 1, 2, 3, 4 or 5 times
IDETRAHLLLKEKMMRLGGRLVLNTKEELANERLMTLKIAEMKEAMRTLIFPPSMHFFQAKHLIERSQVFNILRMMPKGAALHLHDIGIVTMDWLVRNGGGGSNVTEFDDSLLRNFTLVTQHPEVIYTNQNVVWSKFETIFFTISGLIHYAPVFRDYVFRSMQEFYEDNVLYMEIRARLLPVYELSGEHHDEEWSVKTYQEVAQKFVETHPEFIGIKIIYNDHRSKDVAVIAESIRMAMGLRIKFPTVVAGFDLVGHEDTGHSLHDYKEALMIPAKDGVKLPYFFHAGETDWQGTSIDRNILDALMLNTTRIGHGFALSKHPAVRTYSWKKDIPIEVCPISNQVLKLVSDLRNHPVATLMATGHPMVISSDDPAMFGAKGLSYDFYEVFMGIGGMKADLRTLKQLAMNSIKYSTLLESEKNTFMEIWKKRWDKFIADVATK

SEQ ID NO: 927 - protein, 444 aa, synthetic construct
  REGION 1..444: note = human ADA2 S262N/C105-T147del->(GGGGS)n, maturenumbering, where n = 1 to 5
  REPEAT 105..109: note = occurring 1, 2, 3, 4 or 5 times
IDETRAHLLLKEKMMRLGGRLVLNTKEELANERLMTLKIAEMKEAMRTLIFPPSMHFFQAKHLIERSQVFNILRMMPKGAALHLHDIGIVTMDWLVRNVTYRPHGGGGSEFDDSLLRNFTLVTQHPEVIYTNQNVVWSKFETIFFTISGLIHYAPVFRDYVFRSMQEFYEDNVLYMEIRARLLPVYELSGEHHDEEWSVKTYQEVAQKFVETHPEFIGIKIIYNDHRSKDVAVIAESIRMAMGLRIKFPTVVAGFDLVGHEDTGHSLHDYKEALMIPAKDGVKLPYFFHAGETDWQGTSIDRNILDALMLNTTRIGHGFALSKHPAVRTYSWKKDIPIEVCPISNQVLKLVSDLRNHPVATLMATGHPMVISSDDPAMFGAKGLSYDFYEVFMGIGGMKADLRTLKQLAMNSIKYSTLLESEKNTFMEIWKKRWDKFIADVATK

SEQ ID NO: 928 - protein, 423 aa, synthetic construct
  REGION 1..423: note = human ADA2 S262N/N98-N156Del, mature numbering
IDETRAHLLLKEKMMRLGGRLVLNTKEELANERLMTLKIAEMKEAMRTLIFPPSMHFFQAKHLIERSQVFNILRMMPKGAALHLHDIGIVTMDWLVRFTLVTQHPEVIYTNQNVVWSKFETIFFTISGLIHYAPVFRDYVFRSMQEFYEDNVLYMEIRARLLPVYELSGEHHDEEWSVKTYQEVAQKFVETHPEFIGIKIIYNDHRSKDVAVIAESIRMAMGLRIKFPTVVAGFDLVGHEDTGHSLHDYKEALMIPAKDGVKLPYFFHAGETDWQGTSIDRNILDALMLNTTRIGHGFALSKHPAVRTYSWKKDIPIEVCPISNQVLKLVSDLRNHPVATLMATGHPMVISSDDPAMFGAKGLSYDFYEVFMGIGGMKADLRTLKQLAMNSIKYSTLLESEKNTFMEIWKKRWDKFIADVATK

SEQ ID NO: 929 - protein, 438 aa, synthetic construct
  REGION 1..438: note = human ADA2 S262N/C105-E148Del, mature numbering
IDETRAHLLLKEKMMRLGGRLVLNTKEELANERLMTLKIAEMKEAMRTLIFPPSMHFFQAKHLIERSQVFNILRMMPKGAALHLHDIGIVTMDWLVRNVTYRPHFDDSLLRNFTLVTQHPEVIYTNQNVVWSKFETIFFTISGLIHYAPVFRDYVFRSMQEFYEDNVLYMEIRARLLPVYELSGEHHDEEWSVKTYQEVAQKFVETHPEFIGIKIIYNDHRSKDVAVIAESIRMAMGLRIKFPTVVAGFDLVGHEDTGHSLHDYKEALMIPAKDGVKLPYFFHAGETDWQGTSIDRNILDALMLNTTRIGHGFALSKHPAVRTYSWKKDIPIEVCPISNQVLKLVSDLRNHPVATLMATGHPMVISSDDPAMFGAKGLSYDFYEVFMGIGGMKADLRTLKQLAMNSIKYSTLLESEKNTFMEIWKKRWDKFIADVATK

SEQ ID NO: 930 - protein, 439 aa, synthetic construct
  REGION 1..439: note = human ADA2 S262N/C105-T147Del, mature numbering
IDETRAHLLLKEKMMRLGGRLVLNTKEELANERLMTLKIAEMKEAMRTLIFPPSMHFFQAKHLIERSQVFNILRMMPKGAALHLHDIGIVTMDWLVRNVTYRPHEFDDSLLRNFTLVTQHPEVIYTNQNVVWSKFETIFFTISGLIHYAPVFRDYVFRSMQEFYEDNVLYMEIRARLLPVYELSGEHHDEEWSVKTYQEVAQKFVETHPEFIGIKIIYNDHRSKDVAVIAESIRMAMGLRIKFPTVVAGFDLVGHEDTGHSLHDYKEALMIPAKDGVKLPYFFHAGETDWQGTSIDRNILDALMLNTTRIGHGFALSKHPAVRTYSWKKDIPIEVCPISNQVLKLVSDLRNHPVATLMATGHPMVISSDDPAMFGAKGLSYDFYEVFMGIGGMKADLRTLKQLAMNSIKYSTLLESEKNTFMEIWKKRWDKFIADVATK

SEQ ID NO: 931 - protein, 436 aa, synthetic construct
  REGION 1..436: note = human ADA2 S262N/V99-Q144del, mature numbering
IDETRAHLLLKEKMMRLGGRLVLNTKEELANERLMTLKIAEMKEAMRTLIFPPSMHFFQAKHLIERSQVFNILRMMPKGAALHLHDIGIVTMDWLVRNNVTEFDDSLLRNFTLVTQHPEVIYTNQNVVWSKFETIFFTISGLIHYAPVFRDYVFRSMQEFYEDNVLYMEIRARLLPVYELSGEHHDEEWSVKTYQEVAQKFVETHPEFIGIKIIYNDHRSKDVAVIAESIRMAMGLRIKFPTVVAGFDLVGHEDTGHSLHDYKEALMIPAKDGVKLPYFFHAGETDWQGTSIDRNILDALMLNTTRIGHGFALSKHPAVRTYSWKKDIPIEVCPISNQVLKLVSDLRNHPVATLMATGHPMVISSDDPAMFGAKGLSYDFYEVFMGIGGMKADLRTLKQLAMNSIKYSTLLESEKNTFMEIWKKRWDKFIADVATK
